(19) United States
(12) Patent Application Publication
(10) Pub. No.: US 2017/0051323 A1
(43) Pub. Date: Feb. 23, 2017

(54) Method for Producing L-Amino Acids Using an Alkaliphilic Bacteria

(71) Applicant: EVONIK DEGUSSA GMBH, Essen (DE)

(72) Inventors: Ines OCHROMBEL, Bielefeld (DE); Brigitte BATHE, Salzkotten (DE); Marleen HASSELMEYER, Paderborn (DE); Jörn Kalinowski, Bielefeld (DE); Christian Rückert, Gütersloh (DE); Marcus Persicke, Bielefeld (DE)

(73) Assignee: Evonik Degussa GmbH, Essen (DE)

(21) Appl. No.: 15/307,372

(22) PCT Filed: Apr. 16, 2015
(86) PCT No.: PCT/EP2015/058307

§ 371 Date: Oct. 28, 2016

(30) Foreign Application Priority Data
Apr. 30, 2014 (DE) 102014208199.8
Apr. 30, 2014 (EP) 14166633.9

(51) Int. Cl. C12P 13/04; C12N 1/20; C12N 9/86; C12N 9/88; C12N 9/06; C12N 9/78

(52) U.S. Cl. CPC C12P 13/04; C12N 9/0016; C12N 9/78; C12N 9/86; C12N 9/88; C12Y 104/01001; C12Y 305/02007; C12Y 305/03013; C12Y 402/01049; C12Y 403/01003; C12N 1/20

(57) ABSTRACT

Surprisingly, it has been found that alkaliphilic bacteria of the genus Corynebacterium are naturally suited to produce L-amino acids.

[0001] The present invention relates to a method for producing L-amino acids, in which an alkaliphilic bacterium, particularly a strain of the species Corynebacterium humireducens, is used.

[0002] Methods for producing L-amino acids, in which bacteria from the genus Corynebacterium are used, are known to those skilled in the art.

[0003] Although numerous Corynebacterium types are known, bacteria of the Corynebacterium glutamicum type are normally used in these methods since this type has been found to be particularly advantageous for producing L-amino acids.

[0004] The object of the present invention was to provide a new strain which is either directly useful as an alternative to C. glutamicum for the production of L-amino acids, since it has a significant overproduction of at least one L-amino acid, or can be considered at least as a promising starting strain for developing a new L-amino acid production strain.

[0005] In order to be a possible starting strain for the development of a new L-amino acid production strain, relatively slight L-amino acid overproduction is already sufficient. This is because by overexpression or attenuation of genes or enzymes for which the favourable or deleterious effect on the production of the relevant amino acids is known, and optionally by undirected mutagenesis, starting from such a starting strain the L-amino acid yield can be correspondingly increased.

[0006] In accordance with the invention, it has now been found, surprisingly, that an alkaliphilic bacterium, namely a bacterium of the species Corynebacterium humireducens, already naturally overproduces the L-amino acids L-alanine, L-glutamic acid and L-valine in significant amounts.

[0007] Furthermore, by culturing in a medium that comprises AEC and optionally threonine, a C. humireducens strain could be obtained which produces significant amounts of L-lysine.

[0008] C. humireducens therefore constitutes at the same time a suitable starting point for the production of further L-amino acid production strains. This is because by corresponding diversion of the bacterial metabolism, the overproduction of the L-amino acids mentioned may be converted into overproduction of other desired L-amino acids.

[0009] The naturally occurring overproduction of L-alanine is presumably a result of a particularly highly efficient alanine dehydrogenase which has been found in C. humireducens. Alanine dehydrogenases have only been described to date for a few other Corynebacteria, but not for such an active alanine dehydrogenase whose presence already leads to an accumulation of L-alanine within the cell of the wild type.

[0010] The naturally occurring overproduction of L-glutamate is presumably a result of particularly highly efficient hut genes (“histidine utilization” genes). The hut cluster consists of the four genes hutU (urocanate hydratase), hutI (imidazolonepropionase), hutH (histidine ammonia-lyase) and hutG (formimidoylglutamase). hut Genes have only been described to date for a few other Corynebacteria, but not for such active hut genes whose presence already leads to an accumulation of L-glutamate within the cell of the wild type.

[0011] The present invention therefore firstly relates to a method for the overproduction of an L-amino acid, characterized in that an alkaliphilic bacterium, preferably an alkaliphilic coryneform bacterium, particularly an alkaliphilic Corynebacterium, particularly preferably C. humireducens, is used in said method.

[0012] Alkaliphilic bacteria according to the invention are preferably halotolerant and/or humic acid-reducing.

[0013] According to the invention, an “alkaliphilic bacterium” should be understood to mean a bacterium which is capable of growing at a pH of 8.5 to 11. Preferably, it should be understood to mean a bacterium which is also capable of growing at a pH of 9 to 10.5.

[0014] According to the invention, a “halotolerant bacterium” should be understood to mean a bacterium which is capable of growing at water activities of 0.6 to 0.98. Preferably, it should be understood to mean a bacterium which is also capable of growing at water activities of 0.75 to 0.9.

[0015] “L-amino acid” in accordance with the invention is understood to mean, in particular, the proteinogenic L-amino acids.

[0016] The L-amino acid is in this case preferably selected from L-alanine, L-valine, L-amino acids of the glutamate family, particularly L-glutamate, L-glutamine, L-proline and L-arginine, and L-amino acids of the aspartate family, particularly L-aspartate, L-asparagine, L-methionine, L-lysine, L-isoleucine and L-threonine. The L-amino acid is particularly preferably selected from L-alanine, L-valine, L-glutamate, L-methionine, L-lysine and L-threonine, especially from L-alanine, L-valine, L-glutamate and L-lysine.

[0017] The C. humireducens strain is described for the first time by Wu et al. (International Journal of Systematic and Evolutionary Microbiology (2011), 61, 882-887). Said strain was deposited in the DSMZ under the deposition number DSM 45392 and its 16S rRNA was deposited in the EMBL and has the accession number GQ421281. The starting strain is a halotolerant, alkaliphilic, humic acid-reducing bacterium.

[0018] Further information regarding C. humireducens are to be found in the following publications: Wu et al. (Microb. Biotechnol. (2013), 6(2), 141-149), Lin et al. (Bioresour. Technol. (2013), 136, 302-308).

[0019] Accordingly, the present invention also further relates to an alanine dehydrogenase (Ald), characterized in that said enzyme has a sequence identity of at least 85 or 90%, preferably at least 92, 94, 96 or 98%, especially 100%, to the sequence according to SEQ ID NO: 72.

[0020] Therefore, the present invention also further relates to a polynucleotide which codes for an alanine dehydrogenase according to the invention. Preference is given to a polynucleotide which has a sequence identity of at least 70 or 75%, preferably at least 80 or 85%, particularly preferably at least 90 or 95%, especially 100%, to the sequence of position 301 to 1365 according to SEQ ID NO: 71 and/or a polynucleotide which hybridizes under stringent conditions with a polynucleotide of which the sequence is complementary to the sequence of position 301 to 1365 according to SEQ ID NO: 71.

[0021] Therefore, the present invention also further relates to enzymes of the hut cluster, selected from
[0022] a) a urocanate hydratase (hutU), characterized in that said enzyme has a sequence identity of at least 85 or 90%, preferably at least 92, 94, 96 or 98%, especially 100%, to the sequence according to SEQ ID NO: 190;
[0023] b) an imidazolonepropionase (hutI), characterized in that said enzyme has a sequence identity of at least 85 or 90%, preferably at least 92, 94, 96 or 98%, especially 100%, to the sequence according to SEQ ID NO: 192;
[0024] c) a histidine ammonia-lyase (hutH), characterized in that said enzyme has a sequence identity of at least 85 or 90%, preferably at least 92, 94, 96 or 98%, especially 100%, to the sequence according to SEQ ID NO: 194; and
[0025] d) a formimidoylglutamase, characterized in that said enzyme has a sequence identity of at least 85 or 90%, preferably at least 92, 94, 96 or 98%, especially 100%, to the sequence according to SEQ ID NO: 196.

[0026] Therefore, the present invention also further relates to polynucleotides which code for the genes of the hut cluster according to the invention. In this case, preference is given to the following polynucleotides:

[0027] a) a polynucleotide, which codes for a urocanate hydratase (hutU), and has a sequence identity of at least 70 or 75%, preferably at least 80 or 85%, particularly preferably at least 90 or 95%, especially 100%, to the sequence of position 301 to 1983 according to SEQ ID NO: 189 and/or hybridizes under stringent conditions with a polynucleotide of which the sequence is complementary to the sequence of position 301 to 1983 according to SEQ ID NO: 189;
[0028] b) a polynucleotide, which codes for an imidazolonepropionase (hutI), and has a sequence identity of at least 70 or 75%, preferably at least 80 or 85%, particularly preferably at least 90 or 95%, especially 100%, to the sequence of position 301 to 1509 according to SEQ ID NO: 191 and/or hybridizes under stringent conditions with a polynucleotide of which the sequence is complementary to the sequence of position 301 to 1509 according to SEQ ID NO: 191;

[0029] c) a polynucleotide, which codes for a histidine ammonia-lyase (hutH), and has a sequence identity of at least 70 or 75%, preferably at least 80 or 85%, particularly preferably at least 90 or 95%, especially 100%, to the sequence of position 301 to 1851 according to SEQ ID NO: 193 and/or hybridizes under stringent conditions with a polynucleotide of which the sequence is complementary to the sequence of position 301 to 1851 according to SEQ ID NO: 193; and
[0030] d) a polynucleotide, which codes for a formimidoylglutamase (hutG), and has a sequence identity of at least 70 or 75%, preferably at least 80 or 85%, particularly preferably at least 90 or 95%, especially 100%, to the sequence of position 301 to 1209 according to SEQ ID NO: 195 and/or hybridizes under stringent conditions with a polynucleotide of which the sequence is complementary to the sequence of position 301 to 1209 according to SEQ ID NO: 195.

[0031] In accordance with the invention, “stringent conditions” is understood to mean washing at a salt concentration of 1×SSC and 0.1% by weight SDS at a temperature of 80° C.

[0032] The present invention likewise further relates to polynucleotides which are complementary to the coding polynucleotides according to the invention.

[0033] Accordingly, the present invention also further relates to vectors, in particular cloning and expression vectors, which comprise polynucleotides according to the invention. These vectors can be appropriately incorporated into microorganisms, particularly in coryneform bacteria, especially from the genus Corynbebacterium, or Enterobacteriaceae, especially from the genus Escherichia.

[0034] Furthermore, for the purpose of expression of the encoded genes, a polynucleotide according to the invention can also be incorporated into the genome of microorganisms, in particular into the genome of coryneform bacteria, in particular those of the genus Corynebacterium, or into the genome of Enterobacteriaceae, in particular those of the genus Escherichia.

[0035] The present invention also further relates to corresponding recombinant microorganisms, preferably bacteria, particularly coryneform bacteria, especially those of the genus Corynebacterium, particularly preferably of the species C. humireducens or C. glutamicum, and also Enterobacteriaceae, especially those of the genus Escherichia, comprising one alanine dehydrogenase according to the invention and/or one or more, preferably all, enzymes of the hut cluster according to the invention and/or one or more polynucleotides according to the invention and/or vectors according to the invention.

[0036] A preferred object is, in this context, recombinant Corynebacteria, particularly of the species C. humireducens and the species C. glutamicum, comprising an alanine dehydrogenase according to the invention and/or a polynucleotide coding for said enzyme and/or at least one vector comprising said polynucleotide.

[0037] A further preferred object is, in this context, recombinant Corynebacteria, particularly of the species C. humireducens and the species C. glutamicum, comprising at least one, preferably all, enzyme(s) of the hut cluster and/or polynucleotides coding for said enzymes and/or at least one vector comprising said polynucleotides.

[0038] The present invention also particularly relates to recombinant microorganisms, preferably bacteria, particularly coryneform bacteria, especially those of the genus Corynebacterium, except for the species C. humireducens, in particular of the species C. glutamicum, comprising one alanine dehydrogenase according to the invention and/or one or more, preferably all, enzymes of the hut cluster according to the invention and/or one or more polynucleotides according to the invention and/or vectors according to the invention.

[0039] In accordance with the invention, “recombinant microorganism” or “recombinant bacterium” is understood to mean a microorganism or bacterium that has been subjected to at least one genetic engineering measure. The genetic engineering measure may in particular be, in this context, a targeted or random mutation, the incorporation of a foreign gene and/or the overexpression or attenuation of a host gene or foreign gene. A recombinant microorganism according to the invention or a recombinant bacterium according to the invention is preferably characterized by the overexpression or attenuation of at least one gene. In a particularly preferred embodiment, a microorganism according to the invention or a bacterium according to the invention here is characterized by the overexpression of the alanine dehdrogenase according to the invention or of the polynucleotide coding for said enzyme. In a further particularly preferred embodiment, a microorganism according to the invention or a bacterium according to the invention is characterized by the overexpression of at least one enzyme of the hut cluster according to the invention, particularly all enzymes of the hut cluster according to the invention or the corresponding polynucleotides coding for the enzymes.

[0040] Within the genus Corynebacterium, preference is given to strains according to the invention based on the following species: Corynebacterium efficiens, such as type strain DSM44549, Corynebacterium glutamicum, such as type strain ATCC13032 or the strain R, Corynebacterium ammoniagenes, such as type strain ATCC6871, Corynebacterium humireducens, such as the strain DSM 45392, and Corynebacterium pekinese, such as the strain CGMCC No. 5361.

[0041] Particular preference is given to the species Corynebacterium glutamicum and Corynebacterium humireducens. If, in the context of this application, the strain Corynebacterium humireducens is mentioned, said strain is preferably strain DSM 45392 or a strain derived therefrom.

[0042] Some representatives of the species Corynebacterium glutamicum are also known in the prior art under other names. These include for example: Corynebacterium acetoacidophilum ATCC13870, Corynebacterium lilium D5M20137, Corynebacterium melassecola ATCC17965, Brevibacterium flavum ATCC14067, Brevibacterium lactofermentum ATCC13869 and Brevibacterium divaricatum ATCC14020. The term “Micrococcus glutamicus” for Corynebacterium glutamicum has likewise been in use. Some representatives of the species Corynebacterium efficiens have also been referred to in the prior art as Corynebacterium thermoaminogenes, for example the strain FERM BP-1539.

[0043] Information on the taxonomic classification of strains of the group of the coryneform bacteria can be found, inter alia, in Seiler (Journal of General Microbiology 129, 1433-1477 (1983)), Kinoshita (1985, Glutamic Acid Bacteria, p 115-142. in: Demain and Solomon (ed), Biology of Industrial Microorganisms. The Benjamin/Cummins Publishing Co., London, UK), Kämpfer and Kroppenstedt (Canadian Journal of Microbiology 42, 989-1005 (1996)), Liebl et al (International Journal of Systematic Bacteriology 41, 255-260 (1991)), Fudou et al (International Journal of Systematic and Evolutionary Microbiology 52, 1127-1131 (2002)) and in U.S. Pat. No. 5,250,434.

[0044] Strains with the designation “ATCC” may be obtained from the American Type Culture Collection (Manassas, Va., USA). Strains with the designation “DSM” may be obtained from the Deutschen Sammlung von Mikroorganismen und Zellkulturen (German Microorganism and Cell Culture collection) (DSMZ, Braunschweig, Germany. Strains with the designation “NRRL” may be obtained from the Agricultural Research Service Patent Culture Collection (ARS, Peoria, Ill., US). Strains with the designation “FERM” may be obtained from the National Institute of Advanced Industrial Science and Technology (AIST Tsukuba Central 6, 1-1-1 Higashi, Tsukuba Ibaraki, Japan). Strains with the designation “CGMCC” may be obtained from the China General Microbiological Culture Collection Center (CGMCC, Beijing, China).

[0045] Accordingly, the present invention also further relates to a method for the overproduction of an L-amino acid, characterized in that an alanine dehydrogenase according to the invention and/or at least one enzyme of the hut cluster according to the invention, preferably all enzymes of the hut cluster according to the invention, and/or at least one polynucleotide according to the invention and/or a recombinant microorganism according to the invention, preferably a recombinant bacterium according to the invention, particularly a recombinant coryneform bacterium according to the invention, particularly preferably a recombinant Corynebacterium according to the invention, especially a Corynebacterium of the species C. humireducens or C. glutamicum, is used in said method. In a preferred embodiment according to the invention, the at least one polynucleotide according to the invention or the polypeptide coded by said polynucleotide is used in this case in overexpressed form.

[0046] A preferred object of the present invention is in this case a method for the overproduction of an L-amino acid, characterized in that an alanine dehydrogenase according to the invention and/or at least one polynucleotide coding for said enzyme and/or at least one vector comprising said polynucleotide and/or a recombinant Corynebacterium, preferably of the species C. humireducens or C. glutamicum, which comprises an alanine dehydrogenase according to the invention and/or at least one polynucleotide coding for said enzyme and/or at least one vector comprising said polynucleotide, is used in said method.

[0047] A further preferred object of the present invention is therefore also a method for the overproduction of an L-amino acid, characterized in that at least one enzyme of the hut cluster according to the invention, preferably all enzymes of the hut cluster according to the invention, and/or at least one polynucleotide coding for said enzyme(s), preferably polynucleotides coding for all enzymes of the hut cluster according to the invention, and/or at least one vector comprising said polynucleotide(s) and/or a recombinant Corynebacterium, preferably of the species C. humireducens or C. glutamicum, which comprises at least one enzyme of the hut cluster according to the invention, preferably all enzymes of the hut cluster according to the invention, and/or at least one polynucleotide coding for said enzyme(s), preferably polynucleotides coding for all enzymes of the hut cluster according to the invention, and/or at least one vector comprising said polynucleotide(s), is used in said method.

[0048] The L-amino acid produced in accordance with the invention is in this case preferably selected from L-alanine, L-valine, L-amino acids of the glutamate family, particularly L-glutamate, L-glutamine, L-proline and L-arginine, and L-amino acids of the aspartate family, particularly L-aspartate, L-asparagine, L-methionine, L-lysine, L-isoleucine and L-threonine, particularly preferably selected from L-alanine, L-valine, L-glutamate, L-methionine, L-lysine and L-threonine, especially from L-alanine, L-valine, L-glutamate and L-lysine.

[0049] The Corynebacterium used in the production method according to the invention is preferably selected from C. humireducens and C. glutamicum.

[0050] “Overproduce” or “overproduction” in relation to the L-amino acids is understood to mean, in accordance with the invention, that the microorganisms produce the L-amino acids according to their own requirement, which either enrich in the cell or are secreted into the surrounding nutrient medium where they accumulate. In this case, the microorganisms preferably have the ability to enrich or accumulate in the cell or in the nutrient medium≧(at least) 0.25 g/l, ≧0.5 g/l, ≧1.0 g/l, ≧1.5 g/l, ≧2.0 g/l, ≧4 g/l or ≧10 g/l of the relevant L-amino acids in ≧(at most) 120 hours, ≧96 hours, ≧48 hours, ≧36 hours, ≧24 hours or ≧12 hours.

[0051] Recombinant microorganisms according to the invention, in which polynucleotides according to the invention and/or vectors according to the invention have been incorporated, already have the capability, in a preferred embodiment, to overproduce an L-amino acid before the incorporation of the polynucleotides and/or vectors according to the invention. The starting strains are preferably strains which have been produced by mutagenesis and selection, by recombinant DNA techniques or by a combination of both methods.

[0052] It is obvious and requires no further explanation, that a recombinant microorganism in accordance with the invention can also be thus produced, in which a wild strain, in which a polynucleotide according to the invention and/or a vector according to the invention is present or has been incorporated and by subsequent suitable further genetic engineering measures, causes the L-amino acid to be produced or the L-amino acid production to be increased.

[0053] The present invention further relates also to other polynucleotides from C. humireducens and also the polypeptides encoded by said polynucleotides. By means of overexpression of the relevant polynucleotides or polypeptides, the amino acid production of certain L-amino acids can be positively influenced.

[0054] The present invention therefore likewise relates to:
[0055] a) a threonine dehydratase (IlvA, EC 4.3.1.19) having a sequence identity of at least 90, 95 or 98%, preferably 100%, to the sequence according to SEQ ID NO: 106 and polynucleotides coding for the same,
[0056] b) the subunit of an acetolactate synthase (IlvB) having a sequence identity of at least 90, 95 or 98%, preferably 100%, to the sequence according to SEQ ID NO: 98 and polynucleotides coding for the same,
[0057] c) an isomer reductase (IlvC, EC 1.1.1.86) having a sequence identity of at least 90, 95 or 98%, preferably 100%, to the sequence according to SEQ ID NO: 100 and polynucleotides coding for the same,
[0058] d) a dihydroxyacid dehydratase (IlvD, EC 4.2.1.9) having a sequence identity of at least 90, 95 or 98%, preferably 100%, to the sequence according to SEQ ID NO: 102 and polynucleotides coding for the same,
[0059] e) a transaminase (IlvE, EC 2.6.1.42) having a sequence identity of at least 90, 95 or 98%, preferably 100%, to the sequence according to SEQ ID NO: 104 and polynucleotides coding for the same,
[0060] f) an acetolactate synthase (IlvH, EC 2.2.1.6) having a sequence identity of at least 90, 95 or 98%, preferably 100%, to the sequence according to SEQ ID NO: 122 and polynucleotides coding for the same,
[0061] g) a 3-methyl-2-oxobutanoate hydroxmethyltransferase (PanB, EC 2.1.2.11) having a sequence identity of at least 90, 95 or 98%, preferably 100%, to the sequence according to SEQ ID NO: 118 and polynucleotides coding for the same,
[0062] h) a pantothenate synthase (PanC, EC 6.3.2.1) having a sequence identity of at least 90, 95 or 98%, preferably 100%, to the sequence according to SEQ ID NO: 120 and polynucleotides coding for the same,
[0063] i) a glutamate dehydrogenase (Gdh) having a sequence identity of at least 90, 95 or 98%, preferably 100%, to the sequence according to SEQ ID NO: 124 and polynucleotides coding for the same,
[0064] j) a glutamine synthetase (glutamine synthetase 1) having a sequence identity of at least 90, 95 or 98%, preferably 100%, to the sequence according to SEQ ID NO: 126 and polynucleotides coding for the same,
[0065] k) a glutamine synthetase (glutamine synthetase 2) having a sequence identity of at least 90, 95 or 98%, preferably 100%, to the sequence according to SEQ ID NO: 128 and polynucleotides coding for the same,
[0066] l) a glutamate synthase having a sequence identity of at least 90, 95 or 98%, preferably 100%, to the sequence according to SEQ ID NO: 130 and polynucleotides coding for the same,
[0067] m) an isocitrate dehydrogenase having a sequence identity of at least 90, 95 or 98%, preferably 100%, to the sequence according to SEQ ID NO: 132 and polynucleotides coding for the same,
[0068] n) an aconitate hydrase having a sequence identity of at least 90, 95 or 98%, preferably 100%, to the sequence according to SEQ ID NO: 134 and polynucleotides coding for the same,
[0069] o) a citrate synthase having a sequence identity of at least 90, 95 or 98%, preferably 100%, to the sequence according to SEQ ID NO: 136 and polynucleotides coding for the same,
[0070] p) an aminopeptidase C (PepC) having a sequence identity of at least 90, 95 or 98%, preferably 100%, to the sequence according to SEQ ID NO: 138 and polynucleotides coding for the same,
[0071] q) a pyruvate dehydrogenase having a sequence identity of at least 90, 95 or 98%, preferably 100%, to the sequence according to SEQ ID NO: 140 and polynucleotides coding for the same,
[0072] r) a pyruvate kinase (pyruvate kinase 1) having a sequence identity of at least 90, 95 or 98%, preferably 100%, to the sequence according to SEQ ID NO: 142 and polynucleotides coding for the same,
[0073] s) a pyruvate kinase (pyruvate kinase 2) having a sequence identity of at least 90, 95 or 98%, preferably 100%, to the sequence according to SEQ ID NO: 144 and polynucleotides coding for the same,
[0074] t) an enolase having a sequence identity of at least 90, 95 or 98%, preferably 100%, to the sequence according to SEQ ID NO: 146 and polynucleotides coding for the same,
[0075] u) a 2,3-bisphosphoglycerate-dependent phosphoglycerate mutase (GpmA) having a sequence identity of at least 90, 95 or 98%, preferably 100%, to the sequence according to SEQ ID NO: 148 and polynucleotides coding for the same,
[0076] v) a phosphoglycerate kinase (Pgk) having a sequence identity of at least 90, 95 or 98%, preferably 100%, to the sequence according to SEQ ID NO: 150 and polynucleotides coding for the same,
[0077] w) a glyceraldehyde-3-phosphate dehydrogenase (glycerol-3-phosphate dehydrogenase 1) having a sequence identity of at least 90, 95 or 98%, preferably 100%, to the sequence according to SEQ ID NO: 152 and polynucleotides coding for the same,
[0078] x) a glyceraldehyde-3-phosphate dehydrogenase (glycerol-3-phosphate dehydrogenase 2) having a sequence identity of at least 90, 95 or 98%, preferably 100%, to the sequence according to SEQ ID NO: 154 and polynucleotides coding for the same,
[0079] y) a triosephosphate isomerase (TpiA) having a sequence identity of at least 90, 95 or 98%, preferably 100%, to the sequence according to SEQ ID NO: 156 and polynucleotides coding for the same,
[0080] z) a fructose bisphosphate aldolase having a sequence identity of at least 90, 95 or 98%, preferably 100%, to the sequence according to SEQ ID NO: 158 and polynucleotides coding for the same,
[0081] aa) a 1-phosphofructokinase having a sequence identity of at least 90, 95 or 98%, preferably 100%, to the sequence according to SEQ ID NO: 160 and polynucleotides coding for the same,
[0082] bb) a 6-phosphofructokinase having a sequence identity of at least 90, 95 or 98%, preferably 100%, to the sequence according to SEQ ID NO: 162 and polynucleotides coding for the same,
[0083] cc) a homoserine kinase (ThrB, EC 2.7.1.39) having a sequence identity of at least 90, 95 or 98%, preferably 100%, to the sequence according to SEQ ID NO: 4 and polynucleotides coding for the same,
[0084] dd) a cysteine synthase (CBS, CysK) having a sequence identity of at least 90, 95 or 98%, preferably 100%, to the sequence according to SEQ ID NO: 22 and
[0085] ee) a cystathionine beta-lyase (AecD) having a sequence identity of at least 90, 95 or 98%, preferably 100%, to the sequence according to SEQ ID NO: 26 and polynucleotides coding for the same,
[0086] ff) an aspartate semialdehyde dehydrogenase (Asd, EC 1.2.1.11) having a sequence identity of at least 90, 95 or 98%, preferably 100%, to the sequence according to SEQ ID NO: 28 and polynucleotides coding for the same,
[0087] gg) the smaller subunit of a transporter for branched-chain amino acids (BrnE) having a sequence identity of at least 90, 95 or 98%, preferably 100%, to the sequence according to SEQ ID NO: 30 and polynucleotides coding for the same,
[0088] hh) the larger subunit of a transporter for branched-chain amino acids (BrnF) having a sequence identity of at least 90, 95 or 98%, preferably 100%, to the sequence according to SEQ ID NO: 32 and polynucleotides coding for the same,
[0089] ii) a serine acetyltransferase (CysE) having a sequence identity of at least 90, 95 or 98%, preferably 100%, to the sequence according to SEQ ID NO: 34 and polynucleotides coding for the same,
[0090] jj) a cysteine synthase (CysK) having a sequence identity of at least 90, 95 or 98%, preferably 100%, to the sequence according to SEQ ID NO: 36 and polynucleotides coding for the same,
[0091] kk) the H protein of a glycine cleavage system (GcvH) having a sequence identity of at least 90, 95 or 98%, preferably 100%, to the sequence according to SEQ ID NO: 38 and polynucleotides coding for the same,
[0092] ll) the P protein of a glycine cleavage system (GcvP) having a sequence identity of at least 90, 95 or 98%, preferably 100%, to the sequence according to SEQ ID NO: 40 and polynucleotides coding for the same,
[0093] mm) the T protein of a glycine cleavage system (GcvT) having a sequence identity of at least 90, 95 or 98%, preferably 100%, to the sequence according to SEQ ID NO: 42 and polynucleotides coding for the same,
[0094] nn) a serine hydroxymethyltransferase (GlyA) having a sequence identity of at least 90, 95 or 98%, preferably 100%, to the sequence according to SEQ ID NO: 44 and polynucleotides coding for the same,
[0095] oo) an optionally feedback-resistant homoserine dehydrogenase (Hom, EC 1.2.1.11) having a sequence identity of at least 90, 95 or 98%, preferably 100%, to the sequence according to SEQ ID NO: 46 and polynucleotides coding for the same,
[0096] pp) a lipoyl synthase (LipA) having a sequence identity of at least 90, 95 or 98%, preferably 100%, to the sequence according to SEQ ID NO: 48 and polynucleotides coding for the same,
[0097] qq) a lipoyl transferase (LipB) having a sequence identity of at least 90, 95 or 98%, preferably 100%, to the sequence according to SEQ ID NO: 50 and polynucleotides coding for the same,
[0098] rr) a dihydrolipoyl dehyrogenase (Lpd) having a sequence identity of at least 90, 95 or 98%, preferably 100%, to the sequence according to SEQ ID NO: 52 and polynucleotides coding for the same,
[0099] ss) a lipoate-protein ligase (LplA) having a sequence identity of at least 90, 95 or 98%, preferably 100%, to the sequence according to SEQ ID NO: 94 and polynucleotides coding for the same,
[0100] tt) a dihydrolipoyl dehyrogenase (GcvL) having a sequence identity of at least 90, 95 or 98%, preferably 100%, to the sequence according to SEQ ID NO: 96 and polynucleotides coding for the same,
[0101] uu) a preferably feedback-resistant aspartate kinase (LysC, EC 2.7.2.4) having a sequence identity of at least 90, 95 or 98%, preferably 100%, to the sequence according to SEQ ID NO: 54 and polynucleotides coding for the same,
[0102] vv) a cystathionine gamma-synthase (MetB) having a sequence identity of at least 90, 95 or 98%, preferably 100%, to the sequence according to SEQ ID NO: 56 and polynucleotides coding for the same,
[0103] ww) a 5,10-methylenetetrahydrofolate reductase (MetF) having a sequence identity of at least 90, 95 or 98%, preferably 100%, to the sequence according to SEQ ID NO: 58 and polynucleotides coding for the same,
[0104] xx) a homoserine O-acetyltransferase (MetX) having a sequence identity of at least 90, 95 or 98%, preferably 100%, to the sequence according to SEQ ID NO: 60 and polynucleotides coding for the same,
[0105] yy) an O-acetylhomoserine lyase (MetY) having a sequence identity of at least 90, 95 or 98%, preferably 100%, to the sequence according to SEQ ID NO: 62 and polynucleotides coding for the same,
[0106] zz) a preferably feedback-resistant pyruvate carboxylase (Pyc, EC 6.4.1.1) having a sequence identity of at least 90, 95 or 98%, preferably 100%, to the sequence according to SEQ ID NO: 64 and polynucleotides coding for the same,
[0107] aaa) an optionally feedback-resistant D-3-phosphoglycerate dehydrogenase (SerA) having a sequence identity of at least 90, 95 or 98%, preferably 100%, to the sequence according to SEQ ID NO: 66 and polynucleotides coding for the same,
[0108] bbb) a phosphoserine phosphatase (SerB) having a sequence identity of at least 90, 95 or 98%, preferably 100%, to the sequence according to SEQ ID NO: 68 and polynucleotides coding for the same,
[0109] ccc) a phosphoserine aminotransferase (SerC) having a sequence identity of at least 90, 95 or 98%, preferably 100%, to the sequence according to SEQ ID NO: 70 and polynucleotides coding for the same,
[0110] ddd) the subunit of a sulphate adenylyltransferase (CysD) having a sequence identity of at least 90, 95 or 98%, preferably 100%, to the sequence according to SEQ ID NO: 74 and polynucleotides coding for the same,
[0111] eee) an adenosine phosphosulphate reductase (CysH), having a sequence identity of at least 90, 95 or 98%, preferably 100%, to the sequence according to SEQ ID NO: 76 and polynucleotides coding for the same,
[0112] fff) a sulphite reductase (CysI) having a sequence identity of at least 90, 95 or 98%, preferably 100%, to the sequence according to SEQ ID NO: 78 and polynucleotides coding for the same,
[0113] ggg) an NADPH-dependent glutamate synthetase beta chain (CysJ) having a sequence identity of at least 90, 95 or 98%, preferably 100%, to the sequence according to SEQ ID NO: 80 and polynucleotides coding for the same,
[0114] hhh) the large subunit of a sulphate adenylyltransferase (CysN) having a sequence identity of at least 90, 95 or 98%, preferably 100%, to the sequence according to SEQ ID NO: 82 and polynucleotides coding for the same,
[0115] iii) a cystathionine beta-synthase (CysY) having a sequence identity of at least 90, 95 or 98%, preferably 100%, to the sequence according to SEQ ID NO: 84 and polynucleotides coding for the same,
[0116] jjj) a sulphate transporter (CysZ) having a sequence identity of at least 90, 95 or 98%, preferably 100%, to the sequence according to SEQ ID NO: 86 and polynucleotides coding for the same,
[0117] kkk) a 5-methyltetrahydropteroyltriglutamate-homocysteine methyltransferase (MetE) having a sequence identity of at least 90, 95 or 98%, preferably 100%, to the sequence according to SEQ ID NO: 88 and polynucleotides coding for the same,
[0118] lll) a peptidyl-tRNA hydrolase 1 (PtH1) having a sequence identity of at least 90, 95 or 98%, preferably 100%, to the sequence according to SEQ ID NO: 90 and polynucleotides coding for the same,
[0119] mmm) a peptidyl-tRNA hydrolase 2 (PtH2) having a sequence identity of at least 90, 95 or 98%, preferably 100%, to the sequence according to SEQ ID NO: 92 and polynucleotides coding for the same,
[0120] nnn) a diaminopimelate dehydrogenase (Ddh, EC 1.4.1.16) having a sequence identity of at least 90, 95 or 98%, preferably 100%, to the sequence according to SEQ ID NO: 202 and polynucleotides coding for the same,
[0121] ooo) a diaminopimelate decarboxylase (LysA, EC 4.1.1.20) having a sequence identity of at least 90, 95 or 98%, preferably 100%, to the sequence according to SEQ ID NO: 164 and polynucleotides coding for the same,
[0122] ppp) an aspartate aminotransferase (AaT, EC 2.6.1.1) having a sequence identity of at least 90, 95 or 98%, preferably 100%, to the sequence according to SEQ ID NO: 166 and polynucleotides coding for the same,
[0123] qqq) an L-lysine exporter (LysE, lysine efflux permease) having a sequence identity of at least 90, 95 or 98%, preferably 100%, to the sequence according to SEQ ID NO: 168 and polynucleotides coding for the same,
[0124] rrr) a dihydropicolinate reductase (DapB, EC 1.3.1.26) having a sequence identity of at least 90, 95 or 98%, preferably 100%, to the sequence according to SEQ ID NO: 170 and polynucleotides coding for the same,
[0125] sss) a glucose-6-phosphate dehydrogenase (EC 1.1.1.49) having a sequence identity of at least 90, 95 or 98%, preferably 100%, to the sequence according to SEQ ID NO: 172 and polynucleotides coding for the same,
[0126] ttt) the Zwf subunit of a glucose-6-phosphate dehydrogenase (Zwf, EC 1.1.1.49) having a sequence identity of at least 90, 95 or 98%, preferably 100%, to the sequence according to SEQ ID NO: 186 and polynucleotides coding for the same,
[0127] uuu) the OpcA subunit of a glucose-6-phosphate dehydrogenase (OpcA, EC 1.1.1.49) having a sequence identity of at least 90, 95 or 98%, preferably 100%, to the sequence according to SEQ ID NO: 188 and polynucleotides coding for the same,
[0128] vvv) a phosphogluconic acid dehydrogenase (Gnd, EC 1.1.1.44) having a sequence identity of at least 90, 95 or 98%, preferably 100%, to the sequence according to SEQ ID NO: 174 and polynucleotides coding for the same.

[0129] The present invention further relates also to vectors comprising the polynucleotides mentioned above and also recombinant microorganisms comprising the enzymes and/or polynucleotides and/or vectors mentioned above. In a preferred embodiment, the relevant polypeptide and/or polynucleotide is present in this case in the microorganism in overexpressed form. The recombinant microorganisms are preferably in this case coryneform bacteria, especially Corynebacteria, particularly those of the species C. humireducens or C. glutamicum.

[0130] The present invention therefore also further relates to a method for the overproduction of an L-amino acid, preferably selected from L-alanine, L-valine, L-amino acids of the glutamate family, particularly L-glutamate, L-glutamine, L-proline and L-arginine, and L-amino acids of the aspartate family, particularly L-aspartate, L-asparagine, L-methionine, L-lysine, L-isoleucine and L-threonine, particularly preferably selected from L-alanine, L-valine, L-glutamate, L-methionine, L-lysine and L-threonine, especially from L-alanine, L-valine, L-glutamate and L-lysine, in which at least one, preferably at least two, three or four, of the polynucleotides mentioned are present in overexpressed form, wherein the method is preferably carried out in Corynebacteria, particularly those of the species C. humireducens or C. glutamicum.

[0131] The present invention further relates also to other polynucleotides from C. humireducens and also the polypeptides encoded by said polynucleotides. By means of deactivation or attenuation of the relevant polynucleotides or polypeptides, the amino acid production of certain L-amino acids can be positively influenced.

[0132] The present invention therefore likewise relates to:
[0133] a) a threonine synthase (ThrC, EC 4.2.3.1) having a sequence identity of at least 90, 95 or 98%, preferably 100%, to the sequence according to SEQ ID NO: 108 and polynucleotides coding for the same,
[0134] b) an isopropylmalate synthase (LeuA, EC 2.3.3.13) having a sequence identity of at least 90, 95 or 98%, preferably 100%, to the sequence according to SEQ ID NO: 110 and polynucleotides coding for the same,
[0135] c) an isopropylmalate dehydrogenase (LeuB, EC 1.1.1.85) having a sequence identity of at least 90, 95 or 98%, preferably 100%, to the sequence according to SEQ ID NO: 112 and polynucleotides coding for the same,
[0136] d) the subunits of an isopropylmalate isomerase (LeuCD, EC 4.2.1.33) having sequence identities of at least 90, 95 or 98%, preferably 100%, to the sequences according to SEQ ID NO: 114 or SEQ ID NO: 116 and polynucleotides coding for the same,
[0137] e) the subunits of a succinyl-CoA ligase (SucCD, EC 6.2.1.5) each having sequence identities of at least 90, 95 or 98%, preferably 100%, to the sequences according to SEQ ID NO: 198 or SEQ ID NO: 200 and polynucleotides coding for the same,
[0138] f) a DNA binding domain of type HTH tetR (McbR) having a sequence identity of at least 90, 95 or 98%, preferably 100%, to the sequence according to SEQ ID NO: 2 and polynucleotides coding for the same,
[0139] g) a homoserine kinase (ThrB, EC 2.7.1.39) having a sequence identity of at least 90, 95 or 98%, preferably 100%, to the sequence according to SEQ ID NO: 4 and polynucleotides coding for the same,
[0140] h) a glucose-6-phosphate isomerase (Pgi, EC 5.3.1.9) having a sequence identity of at least 90, 95 or 98%, preferably 100%, to the sequence according to SEQ ID NO: 6 and polynucleotides coding for the same,
[0141] i) a phosphoenolpyruvate carboxykinase (Pck, EC 4.1.1.32) having a sequence identity of at least 90, 95 or 98%, preferably 100%, to the sequence according to SEQ ID NO: 8 and polynucleotides coding for the same,
[0142] j) a D-methionine-binding lipoprotein (MetQ) having a sequence identity of at least 90, 95 or 98%, preferably 100%, to the sequence according to SEQ ID NO: 10 and polynucleotides coding for the same,
[0143] k) a methionine transporter (MetP) having a sequence identity of at least 90, 95 or 98%, preferably 100%, to the sequence according to SEQ ID NO: 12 and polynucleotides coding for the same,
[0144] l) an ATP-dependent methionine transporter (MetN) having a sequence identity of at least 90, 95 or 98%, preferably 100%, to the sequence according to SEQ ID NO: 14 and polynucleotides coding for the same,
[0145] m) an S-adenosylmethionine synthase (MetK) having a sequence identity of at least 90, 95 or 98%, preferably 100%, to the sequence according to SEQ ID NO: 16 and polynucleotides coding for the same,
[0146] n) a methionine import system permease (MetI) having a sequence identity of at least 90, 95 or 98%, preferably 100%, to the sequence according to SEQ ID NO: 18 and polynucleotides coding for the same,
[0147] o) a 4-hydroxy-tetrahydrodipicolinate synthase (DapA, EC 4.3.3.7) having a sequence identity of at least 90, 95 or 98%, preferably 100%, to the sequence according to SEQ ID NO: 20 and polynucleotides coding for the same,
[0148] p) a carboxylate-amine ligase having a sequence identity of at least 90, 95 or 98%, preferably 100%, to the sequence according to SEQ ID NO: 24 and polynucleotides coding for the same,
[0149] q) a malate:quinone oxidoreductase (Mqo, EC 1.1.99.16) having a sequence identity of at least 90, 95 or 98%, preferably 100%, to the sequence according to SEQ ID NO: 176 and polynucleotides coding for the same,
[0150] r) the E1p subunit of a pyruvate dehydrogenase complex (AceE, EC 1.2.4.1) having a sequence identity of at least 90, 95 or 98%, preferably 100%, to the sequence according to SEQ ID NO: 178 and polynucleotides coding for the same,
[0151] s) a citrate synthase (GltA, EC 4.1.3.7) having a sequence identity of at least 90, 95 or 98%, preferably 100%, to the sequence according to SEQ ID NO: 180 and polynucleotides coding for the same,
[0152] t) a malate dehydrogenase (Mdh, EC 1.1.1.37) having a sequence identity of at least 90, 95 or 98%, preferably 100%, to the sequence according to SEQ ID NO: 182 and polynucleotides coding for the same,
[0153] u) a UDP-N-acetylmuramoylalanyl-D-glutamate-2,6-diaminopimelate ligase (MurE, EC 6.3.2.13) having a sequence identity of at least 90, 95 or 98%, preferably 100%, to the sequence according to SEQ ID NO: 184, and polynucleotides coding for the same.

[0154] The present invention further relates also to vectors comprising the polynucleotides mentioned above and also recombinant microorganisms comprising the enzymes and/or polynucleotides and/or vectors mentioned above. In a preferred embodiment, the relevant polypeptide and/or polynucleotide is present in this case in the microorganism in deactivated or attenuated form. The recombinant microorganisms are preferably in this case coryneform bacteria, especially Corynebacteria, particularly those of the species C. humireducens or C. glutamicum, especially of the species C. humireducens.

[0155] The present invention therefore also further relates to a method for the overproduction of an L-amino acid, preferably selected from L-alanine, L-valine, L-amino acids of the glutamate family, particularly L-glutamate, L-glutamine, L-proline and L-arginine, and L-amino acids of the aspartate family, particularly L-aspartate, L-asparagine, L-methionine, L-lysine, L-glutamate, L-methionine, L-lysine and L-threonine, especially from L-alanine, L-valine, L-glutamate and L-lysine, in which at least one, preferably at least two, three or four, of the polynucleotides mentioned are present in deactivated or attenuated form, wherein the method is preferably carried out in Corynebacteria, particularly those of the species C. humireducens or C. glutamicum. In a preferred embodiment, at least one, preferably at least two, three or four of the polynucleotides mentioned in the detailed list above is present at the same time in overexpressed form.

[0156] In a preferred embodiment, microorganisms or bacteria according to the invention, particularly Corynebacteria according to the invention, especially Corynebacteria according to the invention of the species C. humireducens or C. glutamicum, particularly L-valine overproduction strains according to the invention, have at least one, preferably at least 2 or 3, particularly preferably at least 4 or 5, of the following features:
[0157] a) an overexpressed polynucleotide (ilvA gene), which codes for a threonine dehydratase (Ilva, EC 4.3.1.19), preferably for a threonine hydratase having a sequence identity of at least 90, 95 or 98%, preferably 100%, to the sequence according to SEQ ID NO: 106,
[0158] b) an overexpressed polynucleotide (ilvB gene), which codes for the subunit of an acetolactate synthase (IlvB), preferably for the subunit of an acetolactate synthase having a sequence identity of at least 90, 95 or 98%, preferably 100%, to the sequence according to SEQ ID NO: 98,
[0159] c) an overexpressed polynucleotide (ilvN gene), which codes for the preferably feedback-resistant subunit of an acetolactate synthase (IlvN, EC 4.1.3.18),
[0160] d) an overexpressed polynucleotide (ilvC gene), which codes for an isomeroreductase (IlvC, EC 1.1.1.86), preferably for an isomeroreductase having a sequence identity of at least 90, 95 or 98%, preferably 100%, to the sequence according to SEQ ID NO: 100,
[0161] e) an overexpressed polynucleotide (ilvD gene), which codes for a dihydroxyacid dehydratase (IlvD, EC 4.2.1.9), preferably for a dihydroxyacid dehydratase having a sequence identity of at least 90, 95 or 98%, preferably 100%, to the sequence according to SEQ ID NO: 102,
[0162] f) an overexpressed polynucleotide (ilvE gene), which codes for a transaminase (IlvE, EC 2.6.1.42), preferably for a transaminase having a sequence identity of at least 90, 95 or 98%, preferably 100%, to the sequence according to SEQ ID NO: 104,
[0163] g) an overexpressed polynucleotide (ilvH gene), which codes for an acetolactate synthase (IlvH, EC 2.2.1.6), preferably for an acetolactate synthase having a sequence identity of at least 90, 95 or 98%, preferably 100%, to the sequence according to SEQ ID NO: 122,
[0164] h) an attenuated polynucleotide (thrB gene), which codes for a homoserine kinase (ThrB, EC 2.7.1.39), preferably for a homoserine kinase having a sequence identity of at least 90, 95 or 98%, preferably 100%, to the sequence according to SEQ ID NO: 4,
[0165] i) an attenuated polynucleotide (thrC gene), which codes for a threonine synthase (ThrC, EC 4.2.3.1), preferably for a threonine synthase having a sequence identity of at least 90, 95 or 98%, preferably 100%, to the sequence according to SEQ ID NO: 108,
[0166] j) an overexpressed polynucleotide (horn gene), which codes for an optionally feedback-resistant homoserine dehydrogenase (Horn, EC 1.2.1.11), preferably for a homoserine dehydrogenase having a sequence identity of at least 90, 95 or 98%, preferably 100%, to the sequence according to SEQ ID NO: 46,
[0167] k) an attenuated polynucleotide (leuA gene), which codes for an optionally feedback-resistant isopropylmalate synthase (LeuA, EC 2.3.3.13), preferably for an isopropylmalate synthase having a sequence identity of at least 90, 95 or 98%, preferably 100%, to the sequence according to SEQ ID NO: 110,
[0168] l) an attenuated polynucleotide (leuB gene), which codes for an isopropylmalate dehydrogenase (LeuB, EC 1.1.1.85), preferably for an isopropylmalate dehydrogenase having a sequence identity of at least 90, 95 or 98%, preferably 100%, to the sequence according to SEQ ID NO: 112,
[0169] m) attenuated polynucleotides (leuCD genes), which code for the subunits of an isopropylmalate isomerase (LeuCD, EC 4.2.1.33), preferably for the subunits of an isopropylmalate isomerase having sequence identities of at least 90, 95 or 98%, preferably 100%, to the sequences according to SEQ ID NO: 114 and SEQ ID NO: 116,
[0170] n) an overexpressed polynucleotide (panB gene), which codes for a 3-methyl-2-oxobutanoate hydroxymethyltransferase (PanB, EC 2.1.2.11), preferably for a 3-methyl-2-oxobutanoate hydroxymethyltransferase having a sequence identity of at least 90, 95 or 98%, preferably 100%, to the sequence according to SEQ ID NO: 118,
[0171] o) an overexpressed polynucleotide (panC gene), which codes for a pantothenate synthase (PanC, EC 6.3.2.1), preferably for a pantothenate synthase having a sequence identity of at least 90, 95 or 98%, preferably 100%, to the sequence according to SEQ ID NO: 120.

[0172] The present invention further also relates accordingly to a method for the overproduction of an L-amino acid, particularly L-valine, in which such a microorganism or such a bacterium is used.

[0173] In a further preferred embodiment according to the invention, microorganisms or bacteria according to the invention, particularly Corynebacteria according to the invention, especially Corynebacteria according to the invention of the species C. humireducens or C. glutamicum, particularly L-glutamate overproduction strains according to the invention, have at least one, preferably at least two or three, particularly preferably at least four or five, of the following features, particularly preferably in combination with the overexpression of at least one hut gene according to the invention, particularly in combination with the overexpression of all hut genes according to the invention:
[0174] a) an overexpressed polynucleotide (gdh), which codes for a glutamate dehydrogenase (Gdh), preferably for a glutamate dehydrogenase having a sequence identity of at least 90, 95 or 98%, preferably 100%, to the sequence according to SEQ ID NO: 124,
[0175] b) an overexpressed polynucleotide, which codes for a glutamine synthetase (glutamine synthetase 1), preferably for a glutamine synthetase having a sequence identity of at least 90, 95 or 98%, preferably 100%, to the sequence according to SEQ ID NO: 126,
[0176] c) an overexpressed polynucleotide, which codes for a glutamine synthetase (glutamine synthetase 2), preferably for a glutamine synthetase having a sequence identity of at least 90, 95 or 98%, preferably 100%, to the sequence according to SEQ ID NO: 128,
[0177] d) an overexpressed polynucleotide, which codes for a glutamate synthase, preferably for a glutamate synthase having a sequence identity of at least 90, 95 or 98%, preferably 100%, to the sequence according to SEQ ID NO: 130,
[0178] e) an overexpressed polynucleotide, which codes for an isocitrate dehydrogenase, preferably for an isocitrate dehydrogenase having a sequence identity of at least 90, 95 or 98%, preferably 100%, to the sequence according to SEQ ID NO: 132,
[0179] f) an overexpressed polynucleotide, which codes for an aconitate hydrase, preferably for an aconitate hydrase having a sequence identity of at least 90, 95 or 98%, preferably 100%, to the sequence according to SEQ ID NO: 134,
[0180] g) an overexpressed polynucleotide, which codes for a citrate synthase, preferably for a citrate synthase having a sequence identity of at least 90, 95 or 98%, preferably 100%, to the sequence according to SEQ ID NO: 136,
[0181] h) an overexpressed polynucleotide (pepC), which codes for an aminopeptidase C (PepC), preferably for an aminopeptidase C having a sequence identity of at least 90, 95 or 98%, preferably 100%, to the sequence according to SEQ ID NO: 138,
[0182] i) an overexpressed polynucleotide, which codes for a pyruvate dehydrogenase, preferably for a pyruvate dehydrogenase having a sequence identity of at least 90, 95 or 98%, preferably 100%, to the sequence according to SEQ ID NO: 140,
[0183] j) an overexpressed polynucleotide, which codes for a pyruvate kinase (pyruvate kinase 1), preferably for a pyruvate kinase having a sequence identity of at least 90, 95 or 98%, preferably 100%, to the sequence according to SEQ ID NO: 142,
[0184] k) an overexpressed polynucleotide, which codes for a pyruvate kinase (pyruvate kinase 2), preferably for a pyruvate kinase having a sequence identity of at least 90, 95 or 98%, preferably 100%, to the sequence according to SEQ ID NO: 144,

[0185] l) an overexpressed polynucleotide, which codes for an enolase, preferably for an enolase having a sequence identity of at least 90, 95 or 98%, preferably 100%, to the sequence according to SEQ ID NO: 146,
[0186] m) an overexpressed polynucleotide (gpmA), which codes for a 2,3-bisphosphoglycerate-dependent phosphoglycerate mutase (GpmA), preferably for a phosphoglycerate mutase having a sequence identity of at least 90, 95 or 98%, preferably 100%, to the sequence according to SEQ ID NO: 148,
[0187] n) an overexpressed polynucleotide (pgk), which codes for a phosphoglycerate kinase (Pgk), preferably for a phosphoglycerate kinase having a sequence identity of at least 90, 95 or 98%, preferably 100%, to the sequence according to SEQ ID NO: 150,
[0188] o) an overexpressed polynucleotide, which codes for a glyceraldehyde-3-phosphate dehydrogenase (glycerol-3-phosphate dehydrogenase 1), preferably for a glyceraldehyde-3-phosphate dehydrogenase having a sequence identity of at least 90, 95 or 98%, preferably 100%, to the sequence according to SEQ ID NO: 152,
[0189] p) an overexpressed polynucleotide, which codes for a glyceraldehyde-3-phosphate dehydrogenase (glycerol-3-phosphate dehydrogenase 2), preferably for a glyceraldehyde-3-phosphate dehydrogenase having a sequence identity of at least 90, 95 or 98%, preferably 100%, to the sequence according to SEQ ID NO: 154,
[0190] q) an overexpressed polynucleotide (tpiA), which codes for a triosephosphate isomerase (TpiA), preferably for a triosephosphate isomerase having a sequence identity of at least 90, 95 or 98%, preferably 100%, to the sequence according to SEQ ID NO: 156,
[0191] r) an overexpressed polynucleotide, which codes for a fructose bisphosphate aldolase, preferably for a fructose bisphosphate aldolase having a sequence identity of at least 90, 95 or 98%, preferably 100%, to the sequence according to SEQ ID NO: 158,
[0192] s) an overexpressed polynucleotide, which codes for a 1-phosphofructokinase, preferably for a 1-phosphofructokinase having a sequence identity of at least 90, 95 or 98%, preferably 100%, to the sequence according to SEQ ID NO: 160,
[0193] t) an overexpressed polynucleotide, which codes for a 6-phosphofructokinase, preferably for a 6-phosphofructokinase having a sequence identity of at least 90, 95 or 98%, preferably 100%, to the sequence according to SEQ ID NO: 162,
[0194] u) an overexpressed polynucleotide (pgi), which codes for a glucose-6-phosphate isomerase, preferably for a glucose-6-phosphate isomerase having a sequence identity of at least 90, 95 or 98%, preferably 100%, to the sequence according to SEQ ID NO: 6,
[0195] v) attenuated polynucleotides (sucCD), which code for the subunits of a succinyl-CoA ligase (SucCD, EC 6.2.1.5), preferably for the subunits of a succinyl-CoA ligase having sequence identities of at least 90, 95 or 98%, preferably 100%, to the sequences according to SEQ ID NO: 198 or SEQ ID NO: 200.

[0196] The present invention further relates accordingly also to a method for the overproduction of an L-amino acid, particularly L-glutamate, in which such a microorganism or such a bacterium is used.

[0197] In a further preferred embodiment according to the invention, microorganisms or bacteria according to the invention, particularly Corynebacteria according to the invention, especially Corynebacteria according to the invention of the species C. humireducens or C. glutamicum, particularly L-alanine overproduction strains according to the invention, have at least one, preferably at least two or three, particularly preferably at least four or five, of the following features, particularly preferably in combination with the overexpression of the aid gene according to the invention:
[0198] a) an overexpressed polynucleotide (alaD), which codes for an alanine dehydrogenase (AlaD), preferably for an alanine dehydrogenase from Corynebacteria,
[0199] b) an overexpressed polynucleotide (gapA), which codes for a glyceraldehyde-3-phosphate dehydrogenase (GapA), preferably for a glyceraldehyde-3-phosphate dehydrogenase from Corynebacteria,
[0200] c) a deactivated or attenuated polynucleotide (IdhA), which codes for an L-lactate dehydrogenase (LdhA), preferably for an L-lactate dehydrogenase from Corynebacteria, d) a deactivated or attenuated polynucleotide (ppc), which codes for a phosphoenolpyruvate carboxylase (Ppc), preferably for a phosphoenolpyruvate carboxylase from Corynebacteria,
[0201] e) a deactivated or attenuated polynucleotide (alr), which codes for an alanine racemase (Alr), preferably for an alanine racemase from Corynebacteria.

[0202] The present invention further relates accordingly also to a method for the overproduction of an L-amino acid, particularly L-alanine, in which such a microorganism or such a bacterium is used.

[0203] In a further preferred embodiment according to the invention, microorganisms or bacteria according to the invention, particularly Corynebacteria according to the invention, especially Corynebacteria according to the invention of the species C. humireducens or C. glutamicum, particularly L-methionine overproduction strains, have at least one, preferably at least two or three, particularly preferably at least four or five, of the following features:
[0204] a) an attenuated polynucleotide (mcbR), which codes for a DNA binding domain of type HTH tetR (McbR), preferably for a DNA binding domain having a sequence identity of at least 90, 95 or 98%, preferably 100%, to the sequence according to SEQ ID NO: 2,
[0205] b) an attenuated polynucleotide (thrB gene), which codes for a homoserine kinase (ThrB, EC 2.7.1.39), preferably for a homoserine kinase having a sequence identity of at least 90, 95 or 98%, preferably 100%, to the sequence according to SEQ ID NO: 4,
[0206] c) an attenuated polynucleotide (pgi), which codes for a glucose-6-phosphate isomerase (Pgi, EC 5.3.1.9), preferably for a glucose-6-phosphate isomerase having a sequence identity of at least 90, 95 or 98%, preferably 100%, to the sequence according to SEQ ID NO: 6,
[0207] d) an attenuated polynucleotide (pck), which codes for a phosphoenolpyruvate carboxykinase (Pck, EC 4.1.1.32), preferably for a phosphoenolpyruvate carboxykinase having a sequence identity of at least 90, 95 or 98%, preferably 100%, to the sequence according to SEQ ID NO: 8,
[0208] e) an attenuated polynucleotide (metQ), which codes for a D-methionine-binding lipoprotein (MetQ), preferably for a D-methionine-binding lipoprotein having a sequence identity of at least 90, 95 or 98%, preferably 100%, to the sequence according to SEQ ID NO: 10,
[0209] f) an attenuated polynucleotide (metP), which codes for a methionine transporter (MetP), preferably for a methionine transporter having a sequence identity of at least 90, 95 or 98%, preferably 100%, to the sequence according to SEQ ID NO: 12,
[0210] g) an attenuated polynucleotide (metN), which codes for an ATP-dependent methionine transporter (MetN), preferably for an ATP-dependent methionine transporter having a sequence identity of at least 90, 95 or 98%, preferably 100%, to the sequence according to SEQ ID NO: 14,
[0211] h) an attenuated polynucleotide (metK), which codes for an S-adenosylmethionine synthase (MetK), preferably for a S-adenosylmethionine synthase having a sequence identity of at least 90, 95 or 98%, preferably 100%, to the sequence according to SEQ ID NO: 16,
[0212] i) an attenuated polynucleotide (metI), which codes for a methionine import system permease (MetI), preferably for a methionine import system permease having a sequence identity of at least 90, 95 or 98%, preferably 100%, to the sequence according to SEQ ID NO: 18,
[0213] j) an attenuated polynucleotide (dapA), which codes for a 4-hydroxy-tetrahydrodipicolinate synthase (DapA), preferably for a 4-hydroxy-tetrahydrodipicolinate synthase having a sequence identity of at least 90, 95 or 98%, preferably 100%, to the sequence according to SEQ ID NO: 20,
[0214] k) an overexpressed polynucleotide (CBS, cysK), which codes for a cysteine synthase (CBS, CysK), preferably for a cysteine synthase having a sequence identity of at least 90, 95 or 98%, preferably 100%, to the sequence according to SEQ ID NO: 22,
[0215] l) an attenuated polynucleotide, which codes for a carboxylate-amine ligase, preferably for a carboxylate-amine ligase having a sequence identity of at least 90, 95 or 98%, preferably 100%, to the sequence according to SEQ ID NO: 24,
[0216] m) an overexpressed polynucleotide (aecD), which codes for a cystathionine beta-lyase (AecD), preferably for a cystathionine beta-lyase having a sequence identity of at least 90, 95 or 98%, preferably 100%, to the sequence according to SEQ ID NO: 26,
[0217] n) an overexpressed polynucleotide (asd), which codes for an aspartate semialdehyde dehydrogenase (Asd), preferably for an aspartate semialdehyde dehydrogenase having a sequence identity of at least 90, 95 or 98%, preferably 100%, to the sequence according to SEQ ID NO: 28,
[0218] o) an overexpressed polynucleotide (metH), which codes for a 5-methyltetrahydrofolate homocysteine methyltransferase (MetH, EC 2.1.1.13),
[0219] p) an overexpressed polynucleotide (brnE), which codes for the smaller subunit of a transporter for branched-chain amino acids (BrnE), preferably for a subunit having a sequence identity of at least 90, 95 or 98%, preferably 100%, to the sequence according to SEQ ID NO: 30,
[0220] q) an overexpressed polynucleotide (brnF), which codes for the larger subunit of a transporter for branched-chain amino acids (BrnF), preferably for a subunit having a sequence identity of at least 90, 95 or 98%, preferably 100%, to the sequence according to SEQ ID NO: 32,
[0221] r) an overexpressed polynucleotide (cysE), which codes for a serine acetyltransferase (CysE), preferably for a serine acetyltransferase having a sequence identity of at least 90, 95 or 98%, preferably 100%, to the sequence according to SEQ ID NO: 34,
[0222] s) an overexpressed polynucleotide (cysK), which codes for a cysteine synthase (CysK), preferably for a cysteine synthase having a sequence identity of at least 90, 95 or 98%, preferably 100%, to the sequence according to SEQ ID NO: 36,
[0223] t) an overexpressed polynucleotide (gcvH), which codes for the H protein of a glycine cleavage system (GcvH), preferably for an H protein having a sequence identity of at least 90, 95 or 98%, preferably 100%, to the sequence according to SEQ ID NO: 38,
[0224] u) an overexpressed polynucleotide (gcvP), which codes for the P protein of a glycine cleavage system (GcvP), preferably for a P protein having a sequence identity of at least 90, 95 or 98%, preferably 100%, to the sequence according to SEQ ID NO: 40,
[0225] v) an overexpressed polynucleotide (gcvT), which codes for the T protein of a glycine cleavage system (GcvT), preferably for a T protein having a sequence identity of at least 90, 95 or 98%, preferably 100%, to the sequence according to SEQ ID NO: 42,
[0226] w) an overexpressed polynucleotide (glyA), which codes for a serine hydroxmethyltransferase (GlyA), preferably for a serine hydroxymethyltransferase having a sequence identity of at least 90, 95 or 98%, preferably 100%, to the sequence according to SEQ ID NO: 44,
[0227] x) an overexpressed polynucleotide (hom), which codes for an optionally feedback-resistant homoserine dehydrogenase (Hom), preferably for a homoserine dehydrogenase having a sequence identity of at least 90, 95 or 98%, preferably
[0228] y) an overexpressed polynucleotide (lipA), which codes for a lipoyl synthase (LipA), preferably for a lipoyl synthase having a sequence identity of at least 90, 95 or 98%, preferably 100%, to the sequence according to SEQ ID NO: 48,
[0229] z) an overexpressed polynucleotide (lipB), which codes for a lipoyl transferase (LipB), preferably for a lipoyl transferase having a sequence identity of at least 90, 95 or 98%, preferably 100%, to the sequence according to SEQ ID NO: 50,
[0230] aa) an overexpressed polynucleotide (lpd), which codes for a dihydrolipoyl dehydrogenase (Lpd), preferably for a dihydrolipoyl dehydrogenase having a sequence identity of at least 90, 95 or 98%, preferably 100%, to the sequence according to SEQ ID NO: 52, bb) an overexpressed polynucleotide (IplA), which codes for a lipoate-protein ligase (LplA), preferably for a lipoate-protein ligase having a sequence identity of at least 90, 95 or 98%, preferably 100%, to the sequence according to SEQ ID NO: 94,
[0231] cc) an overexpressed polynucleotide (gcvL), which codes for a dihydrolipoyl dehydrogenase (GcvL), preferably for a dihydrolipoyl dehydrogenase having a sequence identity of at least 90, 95 or 98%, preferably 100%, to the sequence according to SEQ ID NO: 96,
[0232] dd) an overexpressed polynucleotide (lysC), which codes for a preferably feedback-resistant aspartate kinase (LysC), preferably for an aspartate kinase having a sequence identity of at least 90, 95 or 98%, preferably 100%, to the sequence according to SEQ ID NO: 54,
[0233] ee) an overexpressed polynucleotide (metB), which codes for a cystathionine gamma-synthase (MetB), preferably for a cystathionine gamma-synthase having a sequence identity of at least 90, 95 or 98%, preferably 100%, to the sequence according to SEQ ID NO: 56,
[0234] ff) an overexpressed polynucleotide (metF), which codes for a 5,10-methylenetetrahydrofolate reductase (MetF), preferably for a 5,10-methylenetetrahydrofolate reductase having a sequence identity of at least 90, 95 or 98%, preferably 100%, to the sequence according to SEQ ID NO: 58,
[0235] gg) an overexpressed polynucleotide (metX), which codes for a homoserine O-acetyltransferase (MetX), preferably for a homoserine O-acetyltransferase having a sequence identity of at least 90, 95 or 98%, preferably 100%, to the sequence according to SEQ ID NO: 60,
[0236] hh) an overexpressed polynucleotide (metY), which codes for an O-acetylhomoserine of at least 90, 95 or 98%, preferably 100%, to the sequence according to SEQ ID NO: 62,
[0237] ii) an overexpressed polynucleotide (pyc), which codes for a pyruvate carboxylase (Pyc), preferably for a pyruvate carboxylase having a sequence identity of at least 90, 95 or 98%, preferably 100%, to the sequence according to SEQ ID NO: 64,
[0238] jj) an overexpressed polynucleotide (serA), which codes for an optionally feedback-resistant D-3-phosphoglycerate dehydrogenase (SerA), preferably for a D-3-phosphoglycerate dehydrogenase having a sequence identity of at least 90, 95 or 98%, preferably 100%, to the sequence according to SEQ ID NO: 66,
[0239] kk) an overexpressed polynucleotide (serB), which codes for a phosphoserine phosphatase (SerB), preferably for a phosphoserine phosphatase having a sequence identity of at least 90, 95 or 98%, preferably 100%, to the sequence according to SEQ ID NO: 68,
[0240] ll) an overexpressed polynucleotide (serC), which codes for a phosphoserine aminotransferase (SerC), preferably for a phosphoserine aminotransferase having a sequence identity of at least 90, 95 or 98%, preferably 100%, to the sequence according to SEQ ID NO: 70,
[0241] mm) an overexpressed polynucleotide (cysD), which codes for the subunit of a sulphate adenylyltransferase (CysD), preferably for a subunit having a sequence identity of at least 90, 95 or 98%, preferably 100%, to the sequence according to SEQ ID NO: 74,
[0242] nn) an overexpressed polynucleotide (cysH), which codes for an adenosine phosphosulphate reductase (CysH), preferably for an adenosine phosphosulphate reductase having a sequence identity of at least 90, 95 or 98%, preferably 100%, to the sequence according to SEQ ID NO: 76,
[0243] oo) an overexpressed polynucleotide (cysI), which codes for a sulphite reductase (CysI), preferably for a sulphite reductase having a sequence identity of at least 90, 95 or 98%, preferably 100%, to the sequence according to SEQ ID NO: 78,
[0244] pp) an overexpressed polynucleotide (cysJ), which codes for (CysJ), preferably for one having a sequence identity of at least 90, 95 or 98%, preferably 100%, to the sequence according to SEQ ID NO: 80,
[0245] qq) an overexpressed polynucleotide (cysN), which codes for the subunit of a sulphate adenylyltransferase (CysD), preferably for a subunit having a sequence identity of at least 90, 95 or 98%, preferably 100%, to the sequence according to SEQ ID NO: 82,
[0246] rr) an overexpressed polynucleotide (cysY), which codes for a cystathionine beta-synthase (CysY), preferably for a cystathionine beta-synthase having a sequence identity of at least 90, 95 or 98%, preferably 100%, to the sequence according to SEQ ID NO: 84,
[0247] ss) an overexpressed polynucleotide (cysZ), which codes for a putative sulphate transporter (CysZ), preferably for a sulphate transporter having a sequence identity of at least 90, 95 or 98%, preferably 100%, to the sequence according to SEQ ID NO: 86,
[0248] tt) an overexpressed polynucleotide (metE), which codes for a 5-methyltetrahydropteroyltriglutamate-homocysteine methyltransferase (MetE), preferably for a protein having a sequence identity of at least 90, 95 or 98%, preferably 100%, to the sequence according to SEQ ID NO: 88,
[0249] uu) an overexpressed polynucleotide (ptH1), which codes for a peptidyl-tRNA hydrolase 1 (PtH1), preferably for a peptidyl-tRNA hydrolase 1 having a sequence identity of at least 90, 95 or 98%, preferably 100%, to the sequence according to SEQ ID NO: 90,
[0250] vv) an overexpressed polynucleotide (ptH2), which codes for a peptidyl-tRNA hydrolase 2 (PtH2), preferably for a peptidyl-tRNA hydrolase 2 having a sequence identity of at least 90, 95 or 98%, preferably 100%, to the sequence according to SEQ ID NO: 92.

[0251] The present invention further relates accordingly also to a method for the overproduction of an L-amino acid, particularly L-methionine, in which such a microorganism or such a bacterium is used.

[0252] In a further preferred embodiment, microorganisms or bacteria according to the invention, particularly Corynebacteria according to the invention, especially Corynebacteria according to the invention of the species C. humireducens or C. glutamicum, particularly L-lysine overproduction strains, have at least one, preferably at least 2 or 3, particularly preferably at least 4 or 5, of the following features:
[0253] a) an overexpressed polynucleotide (dapA), which codes for a dihydrodipicolinate synthase (DapA, EC 4.2.1.52), preferably for a dihydrodipicolinate synthase having a sequence identity of at least 90, 95 or 98%, preferably 100%, to the sequence according to SEQ ID NO: 20,
[0254] b) an overexpressed polynucleotide (lysC), which codes for a preferably feedback-resistant aspartate kinase (LysC, EC 2.7.2.4), preferably for an aspartate kinase having a sequence identity of at least 90, 95 or 98%, preferably 100%, to the sequence according to SEQ ID NO: 54,
[0255] c) an overexpressed polynucleotide (ddh), which codes for a diaminopimelate dehydrogenase (Ddh, EC 1.4.1.16), preferably for a diaminopimelate dehydrogenase having a sequence identity of at least 90, 95 or 98%, preferably 100%, to the sequence according to SEQ ID NO: 202,
[0256] d) an overexpressed polynucleotide (asd), which codes for an aspartate semialdehyde dehydrogenase (Asd, EC 1.2.1.11), preferably for an aspartate semialdehyde dehydrogenase having a sequence identity of at least 90, 95 or 98%, preferably 100%, to the sequence according to SEQ ID NO: 28,
[0257] e) an overexpressed polynucleotide (lysA), which codes for a diaminopimelate decarboxylase (LysA, EC 4.1.1.20), preferably for a diaminopimelate decarboxylase having a sequence identity of at least 90, 95 or 98%, preferably 100%, to the sequence according to SEQ ID NO: 164,
[0258] f) an overexpressed polynucleotide (aat), which codes for an aspartate aminotransferase (AaT, EC 2.6.1.1), preferably for an aspartate aminotransferase having a sequence identity of at least 90, 95 or 98%, preferably 100%, to the sequence according to SEQ ID NO: 166,
[0259] g) an overexpressed polynucleotide (lysE), which codes for an L-lysine exporter (LysE, lysine efflux permease), preferably for an L-lysine exporter having a sequence identity of at least 90, 95 or 98%, preferably 100%, to the sequence according to SEQ ID NO: 168,
[0260] h) an overexpressed polynucleotide (pyc), which codes for a pyruvate carboxylase (Pyc, EC 6.4.1.1), preferably for a pyruvate carboxylase having a sequence identity of at least 90, 95 or 98%, preferably 100%, to the sequence according to SEQ ID NO: 64,
[0261] i) an overexpressed polynucleotide (dapF), which codes for a diaminopimelate epimerase (DapF, EC 5.1.1.7),
[0262] j) an overexpressed polynucleotide (dapB), which codes for a dihydropicolinate reductase (DapB, EC 1.3.1.26), preferably for a dihydropicolinate reductase having a sequence identity of at least 90, 95 or 98%, preferably 100%, to the sequence according to SEQ ID NO: 170,
[0263] k) an overexpressed polynucleotide, which codes for a glucose-6-phosphate dehydrogenase (EC 1.1.1.49), preferably for a glucose-6-phosphate dehydrogenase having a sequence identity of at least 90, 95 or 98%, preferably 100%, to the
[0264] l) an overexpressed polynucleotide (zwf), which codes for the Zwf subunit of a glucose-6-phosphate dehydrogenase (Zwf, EC 1.1.1.49), preferably for a Zwf subunit having a sequence identity of at least 90, 95 or 98%, preferably 100%, to the sequence according to SEQ ID NO: 186,
[0265] m) an overexpressed polynucleotide (opcA), which codes for the OpcA subunit of a glucose-6-phosphate dehydrogenase (OpcA, EC 1.1.1.49), preferably for an OpcA subunit having a sequence identity of at least 90, 95 or 98%, preferably 100%, to the sequence according to SEQ ID NO: 188,
[0266] n) an overexpressed polynucleotide (gnd), which codes for a phosphogluconic acid dehydrogenase (Gnd, EC 1.1.1.44), preferably for a phosphogluconic acid dehydrogenase having a sequence identity of at least 90, 95 or 98%, preferably 100%, to the sequence according to SEQ ID NO: 174,
[0267] o) a deactivated or attenuated polynucleotide (mqo), which codes for a malate:quinone oxidoreductase (Mqo, EC 1.1.99.16), preferably for a malate:quinone oxidoreductase having a sequence identity of at least 90, 95 or 98%, preferably 100%, to the sequence according to SEQ ID NO: 176,
[0268] p) a deactivated or attenuated polynucleotide, which codes for the E1p subunit of a pyruvate dehydrogenase complex (AceE, EC 1.2.4.1), preferably for an E1p subunit having a sequence identity of at least 90, 95 or 98%, preferably 100%, to the sequence according to SEQ ID NO: 178,
[0269] q) a deactivated or attenuated polynucleotide (gltA), which codes for a citrate synthase (GltA, EC 4.1.3.7), preferably for a citrate synthase having a sequence identity of at least 90, 95 or 98%, preferably 100%, to the sequence according to SEQ ID NO: 180,
[0270] r) a deactivated or attenuated polynucleotide (mdh), which codes for a malate dehydrogenase (Mdh, EC 1.1.1.37), preferably for a malate dehydrogenase having a sequence identity of at least 90, 95 or 98%, preferably 100%, to the sequence according to SEQ ID NO: 182,
[0271] s) a deactivated or attenuated polynucleotide (murE), which codes for a UDP-N-acetylmuramoylalanyl-D-glutamate-2,6-diaminopimelate ligase, 6-diaminopimelate ligase (MurE, EC 6.3.2.13), preferably for an enzyme having a sequence identity of at least 90, 95 or 98%, preferably 100%, to the sequence according to SEQ ID NO: 184.

[0272] The present invention further relates accordingly also to a method for the overproduction of an L-amino acid, particularly L-lysine, in which such a microorganism or such a bacterium is used.

[0273] The polynucleotides and polypeptides used or to be used in the method according to the invention mentioned above preferably originate from Corynebacteria, particularly from C. glutamicum or C. humireducens, particularly preferably from C. humireducens.

[0274] “Overexpression” in accordance with the invention is generally understood to mean an increase in the intracellular concentration or activity of a ribonucleic acid, a protein (polypeptide) or an enzyme, which are encoded by a corresponding DNA, in a microorganism, compared to the starting strain (parent strain) or wild-type strain. A starting strain (parent strain) means the strain on which the measure leading to overexpression has been carried out.

[0275] The increase in the concentration or activity can be achieved, for example, by increasing the copy number of the corresponding coding polynucleotides, chromosomally or extrachromosomally, by at least one copy.

[0276] A widespread method for increasing the copy number consists of incorporating the corresponding coding polynucleotide into a vector, preferably a plasmid, which is replicated from a microorganism, particularly a coryneform bacterium. Furthermore, transposons, insertion elements (IS elements) or phages can be used as vectors. An abundance of suitable vectors is described in the prior art.

[0277] Another widespread method for achieving overexpression is the method of chromosomal gene amplification. In this method, at least one additional copy of the polynucleotide of interest is inserted into the chromosome of a coryneform bacterium. Such amplification methods are described for example in WO 03/014330 or WO 03/040373.

[0278] A further method for achieving overexpression consists of linking the corresponding gene or allele in a functional manner (operably linked) to a promoter or an expression cassette. Suitable promoters for Corynebacterium glutamicum are described, for example, in FIG. 1 of the review article of Patek et al. (Journal of Biotechnology 104(1-3), 311-323 (2003)) and in comprehensive reviews such as the “Handbook of Corynebacterium glutamicum” (Eds.: Lothar Eggeling and Michael Bott, CRC Press, Boca Raton, US (2005)) or the book “Corynebacteria, Genomics and Molecular Biology” (Ed.: Andreas Burkovski, Caister Academic Press, Norfolk, UK (2008)). In the same way, variants of the dapA promoter, the promoter A25 for example, described in Vasicova et al (Journal of Bacteriology 181, 6188-6191 (1999)), may be used. Furthermore, the gap promoter of Corynebacterium glutamicum (EP 06007373) may be used. Finally, the well-known promoters T3, T7, SP6, M13, lac, tac and trc, described by Amann et al. (Gene 69(2), 301-315 (1988)) and Amann and Brosius (Gene 40(2-3), 183-190 (1985)), may be used. Such a promoter can be inserted, for example, upstream of the relevant gene, typically at a distance of about 1-500 nucleobases from the start codon.

[0279] The measures of overexpression increase the activity or concentration of the corresponding polypeptide preferably by at least 10%, 25%, 50%, 75%, 100%, 150%, 200%, 300%, 400% or 500%, preferably at most by 1000% or 2000%, based on the activity or concentration of said polypeptide in the strain prior to the measure resulting in overexpression.

[0280] The concentration of a protein may be determined via 1- and 2-dimensional protein gel fractionation and subsequent optical identification of the protein concentration by appropriate evaluation software in the gel. A customary method of preparing protein gels for coryneform bacteria and of identifying said proteins is the procedure described by Hermann et al. (Electrophoresis, 22:1712-23 (2001)). The protein concentration may likewise be determined by Western blot hybridization using an antibody specific for the protein to be detected (Sambrook et al., Molecular Cloning: a laboratory manual. 2nd Ed. Cold Spring Harbor Laboratory Press, Cold Spring Harbor, N.Y., 1989) and subsequent optical evaluation using corresponding software for concentration determination (Lohaus and Meyer (1998) Biospektrum 5:32-39; Lottspeich, Angewandte Chemie 38: 2630-2647 (1999)). The activity may be determined by means of a suitable enzyme assay.

[0281] “Attenuation” in accordance with the invention refers to a decrease in the intracellular concentration or activity of a ribonucleic acid, a protein (polypeptide) or an enzyme, which are encoded by a corresponding DNA, in a microorganism, compared to the starting strain (parent strain) or wild-type strain. The starting strain (parent strain) refers to the strain on which the measure for the attenuation was carried out.

[0282] The attenuation can be achieved by reducing the expression of a polypeptide, for example, by using a weak promoter or by using an allele coding for a polypeptide having a lower activity and optionally these measures may be combined. The attenuation can also be achieved by completely preventing the expression of the polypeptide, for example, by deactivating the coding gene.

[0283] The measure of attenuation decreases the activity or concentration of the corresponding polypeptide preferably by at least 10%, 25%, 50% or 75%, at most 100%, based on the activity or concentration of said polypeptide in the strain prior to the measure resulting in attenuation. In a preferred embodiment, the attenuation consists of completely deactivating the expression of the relevant polypeptide.

[0284] Feedback-resistant enzymes in connection with amino acid production is generally understood to mean enzymes which, compared to the wild form, have a lower sensitivity to inhibition by the L-amino acids and/or analogues thereof produced.

[0285] In particular, feedback-resistant aspartate kinases (LysC^{FBR}) mean aspartate kinases which, by comparison with the wild form, show less sensitivity to inhibition by mixtures of lysine and threonine or mixtures of AEC (aminoethylcysteine) and threonine or lysine alone or AEC alone. For lysine production, corresponding strains are preferably used which comprise such feedback-resistant or desensitized aspartate kinases.

[0286] For example, the following feedback-resistant aspartate kinases from C. glutamicum are known from the literature: A279T, A279V, S301F, S301Y, T3081, T311I, R320G, G345D, S381F. With respect to feedback-resistant aspartate kinases from C. glutamicum, reference is also made to the following publications: JP1993184366-A, JP1994062866-A, JP1994261766-A, JP1997070291-A, JP1997322774-A, JP1998165180-A, JP1998215883-A, U.S. Pat. No. 5,688,671-A, EP0387527, WO00/63388, U.S. Pat. No. 3,732,144, JP6261766, Jetten et al. (1995; Applied Microbiology Biotechnology 43: 76-82). Feedback-resistant aspartate kinases from C. glutamicum are deposited in the NCBI GenBank under the following accession numbers: E05108, E06825, E06826, E06827, E08177, E08178, E08179, E08180, E08181, E08182, E12770, E14514, E16352, E16745, E16746, I74588, I74589, I74590, I74591, I74592, I74593, I74594, I74595, I74596, I74597, X57226, L16848, L27125.

[0287] The following feedback-resistant aspartate kinases from C. humireducens according to the invention are preferably used: D274Y, A279E, S301Y, T308I, T311I, G359D.

[0288] For threonine production, preference is likewise given to using strains comprising a corresponding feedback-resistant homoserine dehydrogenase (HomFBR).

[0289] For isoleucine production and valine production, preference is likewise given to using strains comprising a corresponding feedback-resistant acetolactate synthase.

[0290] For leucine production, preference is likewise given to using strains comprising a corresponding feedback-resistant isopropylmalate synthase (LeuAFBR).

[0291] For proline production, preference is likewise given to using strains comprising a corresponding feedback-resistant glutamate-5-kinase (ProBFBR).

[0292] For arginine production, preference is likewise given to using strains comprising a corresponding feedback-resistant ornithine carbamoyltransferase (ArgFFBR).

[0293] For serine production, preference is likewise given to using strains comprising a corresponding feedback-resistant D-3-phosphoglycerate dehydrogenase (SerA^{FBR}).

[0294] For methionine production, preference is likewise given to using strains comprising a corresponding feedback-resistant D-3-phosphoglycerate dehydrogenase (SerA^{FBR}) and/or feedback-resistant pyruvate carboxylases (pyc^{FBR}).

[0295] For tryptophan production, preference is likewise given to using strains comprising a corresponding feedback-resistant phospho-2-dehydro-3-deoxyheptonate aldolase (AroG^{FBR} or AroH^{FBR}).

[0296] With regard to further more preferable properties of the L-amino acid-overproducing C. humireducens strain to be used in accordance with the invention, reference is made to the publication of Wu et al. (2011) cited above and the other publications mentioned above.

[0297] Microorganisms according to the invention, particularly bacteria of the genus Corynebacterium, may be cultured continuously—as described for example in WO 05/021772—or discontinuously in a batch process (batch cultivation or batch method) or in a fed batch or repeated fed batch process for the purpose of producing the L-amino acid. A general review of known cultivation methods is available in the textbook by Chmiel (Bioprozesstechnik 1. Einführung in die Bioverfahrenstechnik [Bioprocess Technology 1. Introduction to Bioprocess Technology] (Gustav Fischer Verlag, Stuttgart, 1991)) or in the textbook by Storhas (Bioreaktoren und periphere Einrichtungen [Bioreactors and Peripheral Devices] (Vieweg Verlag, Braunschweig/Wiesbaden, 1994)).

[0298] The culture medium or fermentation medium to be used has to satisfy the demands of the particular strains in a suitable manner. Descriptions of culture media of different microorganisms are present in the handbook “Manual of Methods for General Bacteriology”, of the American Society for Bacteriology (Washington D.C., USA, 1981). The terms culture medium and fermentation medium or medium are mutually interchangeable.

[0299] The carbon sources used may be sugars and carbohydrates such as glucose, sucrose, lactose, fructose, maltose, molasses, sucrose-containing solutions from sugarbeet or sugarcane production, starch, starch hydrolysate and cellulose, oils and fats such as soybean oil, sunflower oil, groundnut oil and coconut fat, fatty acids such as palmitic acid, stearic acid and linoleic acid, alcohols such as glycerol, methanol and ethanol and organic acids such as acetic acid or lactic acid.

[0300] It is possible to use, as nitrogen source, organic nitrogen-containing compounds such as peptones, yeast extract, meat extract, malt extract, corn steep liquor, soybean flour and urea, or inorganic compounds such as ammonium sulphate, ammonium chloride, ammonium phosphate, ammonium carbonate and ammonium nitrate. The nitrogen sources may be used individually or as a mixture.

[0301] The phosphorus sources used may be phosphoric acid, potassium dihydrogen phosphate or dipotassium hydrogen phosphate or the corresponding sodium-containing salts.

[0302] The culture medium must additionally contain salts, for example in the form of chlorides or sulphates of metals such as sodium, potassium, magnesium, calcium and iron, for example magnesium sulphate or iron sulphate, which are needed for growth. Finally, essential growth factors such as amino acids, for example homoserine, and vitamins, for example thiamine, biotin or pantothenic acid, may be used in addition to the substances mentioned above.

[0303] The feedstocks mentioned may be added to the culture in the form of a single mixture or may be fed in during the cultivation in a suitable manner.

[0304] The pH of the culture can be controlled by employing basic compounds such as sodium hydroxide, potassium hydroxide, ammonia or aqueous ammonia, or acidic compounds such as phosphoric acid or sulphuric acid in a suitable manner. The pH is generally adjusted to a value of 6.0 to 9.0, preferably 6.5 to 8. To control the evolution of foam, it is possible to use antifoams, for example fatty acid polyglycol esters. To maintain the stability of plasmids, it is possible to add to the medium suitable selective substances such as, for example, antibiotics. In order to maintain aerobic conditions, oxygen or oxygenous gas mixtures, for example air, are introduced into the culture. The use of liquids enriched with hydrogen peroxide is likewise possible. If appropriate, the fermentation is conducted at elevated pressure, for example at a pressure of 0.03 to 0.2 MPa. The temperature of the culture is normally 20° C. to 45° C. and preferably 25° C. to 40° C. In batch processes, the cultivation is continued until a maximum of the desired L-amino acid has formed. This aim is normally achieved within 10 hours to 160 hours. In continuous processes, longer cultivation times are possible. The activity of the bacteria results in a concentration (accumulation) of the L-amino acid in the fermentation medium and/or in the bacterial cells.

[0305] Examples of suitable fermentation media are found, inter alia, in the patent specifications U.S. Pat. No. 5,770,409, U.S. Pat. No. 5,840,551 and U.S. Pat. No. 5,990,350 or U.S. Pat. No. 5,275,940.

[0306] Analysis of L-amino acids to determine the concentration at one or more time(s) during the fermentation can take place by separating the L-amino acids by means of ion exchange chromatography, preferably cation exchange chromatography, with subsequent post-column derivatization using ninhydrin, as described in Spackman et al. (Analytical Chemistry 30: 1190-1206 (1958)). It is also possible to employ ortho-phthalaldehyde rather than ninhydrin for post-column derivatization. An overview article on ion exchange chromatography can be found in Pickering (LC•GC (Magazine of Chromatographic Science) 7(6), 484-487 (1989)).

[0307] It is likewise possible to carry out a pre-column derivatization, for example using ortho-phthalaldehyde or phenyl isothiocyanate, and to fractionate the resulting amino acid derivates by reversed-phase chromatography (RP), preferably in the form of high-performance liquid chromatography (HPLC). A method of this type is described, for example, in Lindroth et al. (Analytical Chemistry 51: 1167-1174 (1979)).

[0308] Detection is carried out photometrically (absorption, fluorescence).

[0309] A review regarding amino acid analysis can be found inter alia in the textbook “Bioanalytik” from Lottspeich and Zorbas (Spektrum Akademischer Verlag, Heidelberg, Germany 1998).

[0310] Accordingly, the invention relates also to a method for producing an L-amino acid, characterized in that the following steps are carried out:
[0311] a) fermentation of the microorganisms according to the invention, particularly coryneform bacteria, preferably of the genus Corynebacterium, particularly preferably of the species Corynebacterium glutamicum or Corynebacterium humireducens, in a suitable nutrient medium, and
[0312] b) accumulation of the L-amino acids in the nutrient medium and/or in the cells of the bacteria mentioned.

[0313] A product containing L-amino acid is then provided or produced or recovered in liquid or solid form.

[0314] The fermentation measures result in a fermentation broth which comprises the relevant L-amino acid.

[0315] A fermentation broth means a fermentation medium or nutrient medium in which a microorganism has been cultivated for a certain time and at a certain temperature. The fermentation medium or the media used during the fermentation comprises/comprise all of the substances or components which ensure propagation of the microorganism and formation of the desired L-amino acid.

[0316] When the fermentation is complete, the resulting fermentation broth accordingly comprises
[0317] a) the biomass (cell mass) of the microorganism, said biomass having been produced due to propagation of the cells of said microorganism,
[0318] b) the L-amino acid formed during the fermentation,
[0319] c) the organic by-products formed during the fermentation, and
[0320] d) the constituents of the fermentation medium employed or of the starting materials, such as, for example, vitamins such as biotin or salts such as magnesium sulphate, which have not been consumed in the fermentation.

[0321] The organic by-products include substances which are produced by the microorganisms employed in the fermentation in addition to the desired L-amino acid and are optionally secreted. These also include sugars such as, for example, trehalose.

[0322] The fermentation broth is removed from the culture vessel or fermentation tank, collected where appropriate, and used for providing an L-amino acid-containing product, in liquid or solid form. The expression “recovering the L-amino acid-containing product” is also used for this. In the simplest case, the L-amino acid-containing fermentation broth itself constitutes the recovered product.

[0323] One or more of the measures selected from the group consisting of
[0324] a) partial (>0% to <80%) to complete (100%) or virtually complete (≧80%, ≧90%, ≧95%, ≧96%, ≧97%, ≧98%, ≧99%) removal of the water,
[0325] b) partial (>0% to <80%) to complete (100%) or virtually complete (≧80%, ≧90%, ≧95%, ≧96%, ≧97%, ≧98%, ≧99%) removal of the biomass, the latter being optionally inactivated before removal,
[0326] c) partial (>0% to <80%) to complete (100%) or virtually complete (≧80%, ≧90%, ≧95%, ≧96%, ≧97%, ≧98%, ≧99%, ≧99.3%, ≧99.7%) removal of the organic by-products formed during fermentation, and
[0327] d) partial (>0%) to complete (100%) or virtually complete (≧80%, ≧90%, ≧95%, ≧96%, ≧97%, ≧98%, ≧99%, ≧99.3%, ≧99.7%) removal of the constituents of the fermentation medium employed or of the starting materials, which have not been consumed in the fermentation,
   from the fermentation broth achieves concentration or purification of the L-amino acid. Products having a desired content of L-amino acid are isolated in this way.

[0328] The partial (>0% to <80%) to complete (100%) or virtually complete (≧80% to <100%) removal of the water (measure a)) is also referred to as drying.

[0329] Complete or virtually complete removal of the water, of the biomass, of the organic by-products and of the unconsumed constituents of the fermentation medium employed results in pure (≧80% by weight, ≧90% by weight) or high-purity (≧95% by weight, ≧97% by weight, ≧99% by weight) product forms of the L-amino acid. An abundance of technical instructions for measures a), b), c) and d) is available in the prior art.

### WORKING EXAMPLES

### Example 1

### L-Alanine and L-Valine Performance Assay

[0330] For the L-alanine/L-valine performance assay, the type strain C. humireducens (DSM 45392) was cultured in a shaking flask batch. For this purpose, the C. humireducens strain was incubated in 10 ml of BHI liquid medium (Brain Heart Infusion; Merck) (37 g/l of H₂O) at 37° C. at 200 rpm for 24 h as preculture. 10 ml of shaking flask medium were then inoculated to an OD₆₆₀ of 0.2 and cultured at 37° C. at 200 rpm for 48 h. To prepare said medium, 20 g of ammonium sulphate, 0.4 g of MgSO₄*7H₂O, 0.6 g of KH₂PO₄ and 10 g of yeast extract were dissolved in 750 ml of H₂O. The pH of the solution was adjusted to 7.8 with 20% NH₄OH and the solution was then autoclaved. 4 ml of a vitamin solution (pH 7 with NH₄OH), consisting of 0.25 g/l of thiamine, 50 mg/l of cyanocobalamin, 25 mg/l of biotin and 1.25 g/l of pyridoxine, were then added. In addition, 140 ml of a sterile-filtered 50% glucose solution and 50 g of dry autoclaved CaCO₃ were added and the medium subsequently made up to one litre.

[0331] After culturing, the supernatant of four parallel cultures was in each case analysed by HPLC to determine the alanine and valine content with a detection limit of 0.01 g/l.

[0332] The type strain C. humireducens after culturing for 48 h in shaking flask medium at 37° C., 200 rpm at a shaking flask scale produces around 0.81 g/l of alanine (net yield: 0.011 gₐₗₐₙᵢₙₑ/g_{glucose}) and 1.6 g/l of valine (net yield: 0.022 gᵥₐₗᵢₙₑ/g_{glucose}) (Tab. 1).

TABLE 1
Analytical data from a shaking flask experiment with the
type strain C. humireducens. The values measured after
culturing with cells and with the blank medium are shown.

| | Alanine (g/l) | Valine (g/l) |
|---|---|---|
| C. humireducens | 1.27 | 1.9 |
| Blank medium without cells | 0.46 | 0.3 |

### Example 2

### Glutamate Performance Assay

[0333] For the L-glutamate performance assay, the type strain C. humireducens (DSM 45392) was cultured in a shaking flask batch. For this purpose, the C. humireducens strain was incubated in 10 ml of BHI liquid medium (Brain Heart Infusion; Merck) (37 g/l of H₂O) at 37° C. at 200 rpm for 24 h as preculture. 10 ml of shaking flask medium were then inoculated to an OD₆₆₀ of 0.2 and cultured at 37° C. at 200 rpm for 48 h. To prepare said medium, 20 g of ammonium sulphate, 0.4 g of MgSO₄*7H₂O, 0.6 g of KH₂PO₄ and 10 g of yeast extract were dissolved in 750 ml of H₂O. The pH of the solution was adjusted to 7.8 with 20% NH₄OH and the solution was then autoclaved. 4 ml of a vitamin solution (pH 7 with NH₄OH), consisting of 0.25 g/l of thiamine, 50 mg/l of cyanocobalamin, 25 mg/l of biotin and 1.25 g/l of pyridoxine, were then added. In addition, 140 ml of a sterile-filtered 50% glucose solution and 50 g of dry autoclaved CaCO₃ were added. 5 ml of a 400 mM sterile-filtered threonine stock solution were then added and the medium was subsequently made up to one litre.

[0334] After culturing, the supernatant of four parallel cultures was in each case analysed by HPLC to determine the glutamate content with a detection limit of 0.01 g/l.

[0335] The type strain C. humireducens after culturing for 48 h in shaking flask medium at 37° C., 200 rpm at a shaking flask scale produced 1.8 (+/−0.6) g/l of L-glutamate. The initial concentration of L-glutamate in the medium was 0.78 (+/−0.1) g/l.

### Example 4

### AEC Screening

[0336] Ten individual clones of the wild-type strain C. humireducens (DSM 45392) were each cultured in 10 ml of BHI liquid medium (Brain Heart Infusion; Merck) (37 g/l of H₂O) in shaker flasks overnight at 37° C. and 200 rpm. Next in each case 100 μl of the overnight culture was plated out onto minimal medium agar plates with 25 mM S-2-aminoethyl-L-cysteine (AEC) (MW=164 g/mol) and incubated for three days at 37° C. For the production of the minimal medium, 5 g of (NH₄)₂SO₄, 5 g of urea, 2 g of KH₂PO₄, 2 g of K₂HPO₄ and 10 g of MOPS were dissolved in 750 ml of H₂O, the pH adjusted to 7.6 with 1 M KOH and the mixture autoclaved. The remaining components were made up and sterile-filtered separately. For this, 20 ml of 50% (w/v) glucose, 1 ml of 1% (w/v) CaCl₂, 1 ml of 1 M MgSO₄, 1 ml of 0.02% biotin and 1 ml of trace element solution (1 g of FeSO₄×7 H₂O, 1 g of MnSO₄×7 H₂O, 0.1 g of ZnSO₄×7 H₂O, 0.021 g of CuSO₄×5 H₂O and 0.002 g of NiCl₂×6 H₂O per 100 ml of H₂O) were added to the medium and then made up to 1000 ml with sterile H₂O. For the culturing on solid medium plates, 15 g/l agar-agar (Merck) was added to the medium. Visible individual colonies were again plated out onto fresh minimal medium agar plates with 25 mM AEC and 12.5 mM threonine as a fractionated smear and incubated for three days at 37° C. Then in each case 10 ml of BHI liquid medium (Brain Heart Infusion; Merck) (37 g/l of H₂O) in the shaker flask were inoculated with a single clone and incubated overnight at 37° C. shaking at 200 rpm, then treated with 10% glycerine and stored at −80° C. as reference samples.

Sequence Analysis of the lysC Sequence Region

[0337] For the analysis of the lysC sequence regions of the isolated individual clones, the relevant gene region of lysC was amplified by means of primers (lysC_for: 5″AGACGAAAGGCGGCCTACAC3″ and lysC_rev: 5″TCCAGGATCGAGCGCATCAC3″) and the PCR technique. The DNA sequences obtained were analysed by means of the software Clone Manager. Through the analysis of the lysC sequence of the isolated AEC+threonine resistant C. humireducens clones, the following point mutations were identified:

TABLE 2
Identified changes in the lysC gene of AEC + threonine resistant
C. humireducens clones and amino acid substitutions caused thereby.

| C. humireducens clones | Point mutation | AA substitution |
|---|---|---|
| C. humireducens AEC Thr r#1 | C → T | T308I |
| C. humireducens AEC Thr r#2 | G → A | G359D |
| C. humireducens AEC Thr r#3 | C → T | T311I |
| C. humireducens AEC Thr r#4 | C → T | T311I |
| C. humireducens AEC Thr r#5 | G → T | D274Y |
| C. humireducens AEC Thr r#6 | C → T | T308I |
| C. humireducens AEC Thr r#7 | C → A | S301Y |
| C. humireducens AEC Thr r#9 | C → T | T308I |
| C. humireducens AEC Thr r#10 | C → A | A279E |

### Example 5

### L-Lysine Performance Assay

[0338] The type strain C. humireducens and the isolated individual clones from the AEC+threonine screening were cultured in shaker flasks and subjected to a performance assay as regards their lysine synthesis on the shaker flask scale. For this, the C. humireducens strain and the isolated AEC+threonine resistant C. humireducens clones were incubated in 10 ml of BHI liquid medium (Brain Heart Infusion; Merck) (37 g/l of H₂O) as a preculture at 37° C. and 200 rpm for 24 hrs. 10 ml of shaking flask medium were then inoculated to an OD₆₆₀ of 0.2 and cultured at 37° C. at 200 rpm for 48 h. For the preparation of this medium 7.5 g of corn steep liquor (50%), 20 g of morpholinopropanesulphonic acid (MOPS), 25 g of (NH₄)₂SO₄, 0.1 g of KH₂PO₄, 1 g of MgSO₄*7H₂O, 0.01 g of CaCl₂*2H₂O, 0.01 g of FeSO₄*7H₂O and 0.005 g of MnSO₄*H₂O were dissolved in 750 ml of H₂O, the pH was adjusted to 7.0 with aqueous ammonia and the mixture autoclaved. Next, 25 g of dry autoclaved CaCO₃ were added. The remaining components were made up and sterile-filtered separately. For this, 90 ml of 50% (w/v) glucose and 10 ml of a solution of 30 mg/l thiamine and 20 mg/l biotin were added to the medium and then made up to 1000 ml with sterile H₂O.

[0339] After the culturing, in each case from the supernatant of two parallel cultures, an HPLC analysis was performed for determination of the L-lysine contents with a detection limit of ≧0.01 g/l. The lysine end titres and yields of the cultures are shown in the following table.

TABLE 3
Mean values and standard deviation of the lysine end
titres of two parallel cultures with AEC + threonine
resistant C. humireducens clones after 48 h culturing
in shaker flask medium at 37° C. and 200 rpm.

| | Lysine (g/l) | |
|---|---|---|
| | Mean value | Std. dev. |
| Type strain C. humireducens | 0.13 | 0.01 |
| C. humireducens_AEC_Thr_r#1 | 1.33 | 0.08 |
| C. humireducens_AEC_Thr_r#2 | 1.33 | 0.08 |
| C. humireducens_AEC_Thr_r#3 | 1.25 | 0.01 |
| C. humireducens_AEC_Thr_r#4 | 1.29 | 0.01 |
| C. humireducens_AEC_Thr_r#5 | 1.24 | 0.09 |
| C. humireducens_AEC_Thr_r#6 | 0.85 | 0.04 |
| C. humireducens_AEC_Thr_r#7 | 1.12 | 0.00 |
| C. humireducens_AEC_Thr_r#9 | 1.18 | 0.02 |
| C. humireducens_AEC_Thr_r#10 | 1.34 | 0.03 |

1-15. (canceled)

16. A recombinant microorganism, useful in the production of an amino acid, wherein said microorganism has been engineered to overexpress one or more enzymes selected from the group consisting of:
a) an alanine dehydrogenase comprising an amino acid sequence at least 85% identical to the sequence of SEQ ID NO:72;
b) an enzyme of the hut cluster, selected from the group consisting of:
i) a urocanate hydratase (hutU) enzyme, comprising a sequence at least 90% identical to the sequence of SEQ ID NO:192;
ii) an imidazolonepropionase (hutI) enzyme comprising a sequence at least 90%, identical to the sequence of SEQ ID NO:194;
iii) a histidine ammonia-lyase (hutH) enzyme comprising a sequence at least 90%, identical to the sequence of SEQ ID NO:196;
iv) a formimidoylglutamase, characterized in that said enzyme has a sequence identity of at least 90% identical to the sequence of SEQ ID NO:198.

17. The recombinant microorganism of claim 16, wherein said alanine dehydrogenase is overexpressed.

18. The recombinant microorganism of claim 17, wherein said alanine dehydrogenase comprises an amino acid sequence at least 85% identical to the sequence of SEQ ID NO:72.

19. The recombinant microorganism of claim 17, wherein said alanine dehydrogenase comprises an amino acid sequence at least 95% identical to the sequence of SEQ ID NO:72.

20. The recombinant microorganism of claim 17, wherein said alanine dehydrogenase comprises an amino acid sequence at least 98% identical to the sequence of SEQ ID NO:72.

21. The recombinant microorganism of claim 17, wherein said alanine dehydrogenase is encoded by either:
a) a sequence at least 75% identical to the sequence from position 301 to position 1365 of SEQ ID NO:71; or
b) a sequence complementary to the sequence of paragraph (a).

22. The recombinant microorganism of claim 17, wherein said alanine dehydrogenase is encoded by either:
a) a sequence at least 85% identical to the sequence from position 301 to position 1365 of SEQ ID NO:71; or
b) a sequence complementary to the sequence of paragraph (a).

23. The recombinant microorganism of claim 17, wherein said alanine dehydrogenase is encoded by either:
a) a sequence at least 95% identical to the sequence from position 301 to position 1365 of SEQ ID NO:71; or
b) a sequence complementary to the sequence of paragraph (a).

24. The recombinant microorganism of claim 16, wherein at least one of the enzymes i)-iv) of said hut cluster is overexpressed.

25. The recombinant microorganism of claim 24, wherein at least two of the enzymes i)-iv) of said hut cluster are overexpressed.

26. The recombinant microorganism of claim 24, wherein at least three of the enzymes i)-iv) of said hut cluster are overexpressed.

27. The recombinant microorganism of claim 24, wherein all four of the enzymes i)-iv) of said hut cluster are overexpressed.

28. The recombinant microorganism of claim 24, wherein said microorganism is of the species C. humireducens.

29. The recombinant microorganism of claim 24, wherein said microorganism is of the species C. glutamicum.

30. A method for the overproduction of an L-amino acid, comprising:
a) culturing the recombinant microorganism of claim 16 in a fermentation medium to produce a fermentation broth;
b) recovering the L-amino acid-containing product.

31. The method of claim 30, wherein said L-amino acid is selected from the group consisting of: L-glutamate, L-glutamine, L-proline, L-arginine, L-aspartate, L-asparagine, L-methionine, L-isoleucine and L-threonine.

32. The method of claim 30, wherein said L-amino acid is selected from the group consisting of: L-alanine; L-valine; L-glutamic acid; and L-lysine.

33. The method of claim 30, wherein said recombinant microorganism is an alkaliphilic bacterium.

34. The method of claim 33, wherein said recombinant microorganism is a bacterium of the species C. humireducens.

35. A recombinant microorganism engineered to overexpress an alanine dehydrogenase comprising an amino acid sequence at least 90% identical to the sequence of SEQ ID NO:72, and further comprising one or more enzymes selected from the group consisting of:
a) a threonine dehydratase (IlvA, EC 4.3.1.19) having a a sequence at least 95% identical to the sequence of SEQ ID NO:106;
b) a subunit of an acetolactate synthase (IIvB) having a sequence at least 95% identical to SEQ ID NO:98;
c) an isomer reductase (IlvC, EC 1.1.1.86) having a sequence at least 95% identical to the sequence of SEQ ID NO:100;
d) a dihydroxyacid dehydratase (IlvD, EC 4.2.1.9) having a sequence at least 95%, identical to the sequence of SEQ ID NO:102;
e) a transaminase (IlvE, EC 2.6.1.42) having a sequence at least 95%, identical to the sequence of SEQ ID NO:104;
f) an acetolactate synthase (IlvH, EC 2.2.1.6) having a sequence at least 95% identical to the sequence of SEQ ID NO:122;
g) a threonine synthase (ThrC, EC 4.2.3.1) having a sequence at least 95% identical to the sequence of SEQ ID NO:108;
h) an optionally feedback-resistant isopropylmalate synthase (LeuA, EC 2.3.3.13) having a sequence at least 95% identical to the sequence of SEQ ID NO:110;
i) an isopropylmalate dehydrogenase (LeuB, EC 1.1.1.85) having a sequence at least 95% identical to the sequence of SEQ ID NO:112;
j) the subunits of an isopropylmalate isomerase (LeuCD, EC 4.2.1.33) having sequences at least 95% identical to the sequences of SEQ ID NO:114 or SEQ ID NO:116;
k) a 3-methyl-2-oxobutanoate hydroxymethyltransferase (PanB, EC 2.1.2.11) having a sequence at least 95% identical to the sequence of SEQ ID NO:118;
l) a pantothenate synthase (PanC, EC 6.3.2.1) having a sequence at least 95% identical to the sequence of SEQ ID NO:120;
m) a glutamate dehydrogenase (Gdh) having a sequence at least 95%, identical to the sequence of SEQ ID NO:124;
n) a glutamine synthetase (glutamine synthetase 1) having a sequence at least 95% identical to the sequence of SEQ ID NO:126;
o) a glutamine synthetase (glutamine synthetase 2) having a sequence at least 95% identical to the sequence of SEQ ID NO:128;
p) a glutamate synthase having a sequence at least 95% identical to the sequence of SEQ ID NO:130;
q) an isocitrate dehydrogenase having a sequence at least 95% identical to the sequence of: SEQ ID NO:132;
r) an aconitate hydrase having a sequence at least 95% identical to the sequence of SEQ ID NO:134;
s) a citrate synthase having a sequence at least 95% identical to the sequence of SEQ ID NO:136,
t) an aminopeptidase C (PepC) having a sequence at least 95% identical to the sequence of SEQ ID NO:138;
u) a pyruvate dehydrogenase having a sequence at least 95% identical to the sequence of SEQ ID NO:140;
v) a pyruvate kinase (pyruvate kinase 1) having a sequence at least 95% identical to the sequence of SEQ ID NO:142;
w) a pyruvate kinase (pyruvate kinase 2) having a sequence at least 95%, identical to the sequence of SEQ ID NO:144;
x) an enolase having a sequence at least 95% identical to the sequence of SEQ ID NO:146;
y) a 2,3-bisphosphoglycerate-dependent phosphoglycerate mutase (GpmA) having a sequence at least 95% identical to the sequence of SEQ ID NO:148;
z) a phosphoglycerate kinase (Pgk) having a sequence at least 95%, identical to the sequence of SEQ ID NO:150;
aa) a glyceraldehyde-3-phosphate dehydrogenase (glycerol-3-phosphate dehydrogenase 1) having a sequence at least 95% identical to the sequence of SEQ ID NO:152;
bb) a glyceraldehyde-3-phosphate dehydrogenase (glycerol-3-phosphate dehydrogenase 2) having a sequence at least 95% identical to the sequence of SEQ ID NO:154;
cc) a triosephosphate isomerase (TpiA) having a sequence at least 95% identical to the sequence of SEQ ID NO:156;
dd) a fructose bisphosphate aldolase having a sequence at least 95%, identical to the sequence of SEQ ID NO:158;
ee) a 1-phosphofructokinase having a sequence at least 95% identical to the sequence of SEQ ID NO:160;
ff) a 6-phosphofructokinase having a sequence at least 95% identical to the sequence of SEQ ID NO:162;
gg) subunits of a succinyl-CoA ligase (SucCD, EC 6.2.1.5) coded for by attenuated polynucleotides (sucCD);
hh) a DNA binding domain of type HTH tetR (McbR) having a sequence at least 95% identical to the sequence of SEQ ID NO:2;
ii) a homoserine kinase (ThrB, EC 2.7.1.39) having a sequence at least 95%, identical to the sequence of SEQ ID NO:4;
jj) a glucose-6-phosphate isomerase (Pgi, EC 5.3.1.9) having a sequence at last 95% identical to the sequence of SEQ ID NO:6;
kk) a phosphoenolpyruvate carboxykinase (Pck, EC 4.1.1.32) having a sequence at least 95% identical to the sequence of SEQ ID NO:8;
ll) a D-methionine-binding lipoprotein (MetQ) having a sequence at least 95% identical to the sequence of SEQ ID NO:10;
mm) a methionine transporter (MetP) having a sequence at least 95%, identical to the sequence of SEQ ID NO:12;
nn) an ATP-dependent methionine transporter (MetN) having a sequence at least 95%, identical to the sequence of SEQ ID NO:14;
oo) an S-adenosylmethionine synthase (MetK) having a sequence at least 95% identical to the sequence of SEQ ID NO:16;
pp) a methionine import system permease (MetI) having a sequence at least 95% identical to the sequence of SEQ ID NO:18;
qq) a 4-hydroxy-tetrahydrodipicolinate synthase (DapA, EC 4.3.3.7) having a sequence at least 95% identical to the sequence of SEQ ID NO:20;
rr) a cysteine synthase (CBS, CysK) having a sequence at least 95% identical to the sequence of SEQ ID NO:22;
ss) a carboxylate-amine ligase having a sequence at least 95% identical to the sequence of SEQ ID NO:24;
tt) a cystathionine beta-lyase (AecD) having a sequence at least 95%, identical to the sequence of SEQ ID NO:26;
uu) an aspartate semialdehyde dehydrogenase (Asd, EC 1.2.1.11) having a sequence at least 95% identical to the sequence of SEQ ID NO:28;
vv) a 5-methyltetrahydrofolate homocysteine methyltransferase (MetH, EC 2.1.1.13) coded for by an overexpressed polynucleotide (metH);
ww) the smaller subunit of a transporter for branched-chain amino acids (BrnE) having a sequence at least 95% identical to the sequence of SEQ ID NO:30;
xx) the larger subunit of a transporter for branched-chain amino acids (BrnF) having a sequence at least 95% identical to the sequence of SEQ ID NO:32;
yy) a serine acetyltransferase (CysE) having a sequence at least 95% identical to the sequence of SEQ ID NO:34;
zz) a cysteine synthase (CysK) having a sequence at least 95% identical to the sequence of SEQ ID NO:36;
aaa) the H protein of a glycine cleavage system (GcvH) having a sequence at least 95% identical to the sequence of SEQ ID NO:38;
bbb) the P protein of a glycine cleavage system (GcvP) having a sequence at least 95% identical to the sequence of SEQ ID NO:40;
ccc) the T protein of a glycine cleavage system (GcvT) having a sequence at least 95% identical to the sequence of SEQ ID NO:4;
ddd) a serine hydroxymethyltransferase (GlyA) having a sequence at least 95% identical to the sequence of SEQ ID NO:44;
eee) an optionally feedback-resistant homoserine dehydrogenase (Hom, EC 1.2.1.11) having a sequence at least 95% identical to the sequence of SEQ ID NO:46;
fff) a lipoyl synthase (LipA) having a sequence at least 95%, identical to the sequence of SEQ ID NO:48;
ggg) a lipoyl transferase (LipB) having a sequence at least 95%, identical to the sequence of SEQ ID NO:50;
hhh) a dihydrolipoyl dehyrogenase (Lpd) having a sequence at least 95%, identical to the sequence of SEQ ID NO:52;
iii) a lipoate-protein ligase (LplA) having a sequence at least 95% identical to the sequence of SEQ ID NO:94;
jjj) a dihydrolipoyl dehyrogenase (GcvL) having a sequence at least 95% identical to the sequence of SEQ ID NO:96;
kkk) a feedback-resistant aspartate kinase (LysC, EC 2.7.2.4) having a sequence at least 95% identical to the sequence of SEQ ID NO:54;
lll) a cystathionine gamma-synthase (MetB) having a sequence at least 95%, identical to the sequence of SEQ ID NO:56;
mmm) a 5,10-methylenetetrahydrofolate reductase (MetF) having a sequence at least 95% identical to the sequence of SEQ ID NO:58;
nnn) a homoserine O-acetyltransferase (MetX) having a sequence at least 95%, identical to the sequence of SEQ ID NO:60;
ooo) an O-acetylhomoserine lyase (MetY) having a sequence at least 95% identical to the sequence of SEQ ID NO:62;
ppp) a feedback-resistant pyruvate carboxylase (Pyc, EC 6.4.1.1) having a sequence at least 95% identical to the sequence of SEQ ID NO:64;
qqq) an optionally feedback-resistant D-3-phosphoglycerate dehydrogenase (SerA) having a sequence at least 95%, identical to the sequence of SEQ ID NO:66;
rrr) a phosphoserine phosphatase (SerB) having a sequence at least 95% identical to the sequence of SEQ ID NO:68;
sss) a phosphoserine aminotransferase (SerC) having a sequence at least 95% identical to the sequence of SEQ ID NO:70;
ttt) the subunit of a sulphate adenylyltransferase (CysD) having a sequence at least 95% identical to the sequence of SEQ ID NO:74;
uuu) an adenosine phosphosulphate reductase (CysH), having a sequence at least 95% identical to the sequence of SEQ ID NO:76;
vvv) a sulphite reductase (CysI) having a sequence at least 95%, identical to the sequence of SEQ ID NO:78;
www) an NADPH-dependent glutamate synthase beta chain (CysJ) having a sequence at least 95%, identical to the sequence of SEQ ID NO:80;
xxx) the subunit of a sulphate adenylyltransferase (CysN) having a sequence at least 95% identical to the sequence of SEQ ID NO:82;
yyy) a cystathionine beta-synthase (CysY) having a sequence at least 95%, to the sequence of SEQ ID NO:84;
zzz) a sulphate transporter (CysZ) having a sequence at least 95% identical to the sequence of SEQ ID NO:86;
aaaa) a 5-methyltetrahydropteroyltriglutamate-homocysteine methyltransferase (MetE) having a sequence at least 95% identical to the sequence of SEQ ID NO:88;
bbbb) a peptidyl-tRNA hydrolase 1 (PtH1) having a sequence at least 95%, identical to the sequence of SEQ ID NO:90;
cccc) a peptidyl-tRNA hydrolase 2 (PtH2) having a sequence at least 95%, identical to the sequence of SEQ ID NO:92;
dddd) a diaminopimelate dehrogenase (Ddh, EC 1.4.1.16) encoded by an overexpressed polynucleotide (ddh);
eeee) a diaminopimelate decarboxylase (LysA, EC 4.1.1.20) having a sequence at least 95% identical to the sequence of SEQ ID NO:164;
ffff) an aspartate aminotransferase (AaT, EC 2.6.1.1) having a sequence at least 95% identical to the sequence of SEQ ID NO:166;
gggg) an L-lysine exporter (LysE, lysine efflux permease) having a sequence at least 95% identical to the sequence of SEQ ID NO:168;
hhhh) a diaminopimelate epimerase (DapF, EC 5.1.1.7) encoded by an overexpressed polynucleotide (dapF);
iiii) a dihydropicolinate reductase (DapB, EC 1.3.1.26) having a sequence at least 95% identical to the sequence of SEQ ID NO:170;
jjjj) a glucose-6-phosphate dehydrogenase (EC 1.1.1.49) having a sequence at least 95% identical to the sequence of SEQ ID NO:172;
kkkk) the Zwf subunit of a glucose-6-phosphate dehydrogenase (Zwf, EC 1.1.1.49) having a sequence at least 95% identical to the sequence of SEQ ID NO:186;
llll) the OpcA subunit of a glucose-6-phosphate dehydrogenase (OpcA, EC 1.1.1.49) having a sequence at least 95%, identical to the sequence of SEQ ID NO:188;
mmmm) a phosphogluconic acid dehydrogenase (Gnd, EC 1.1.1.44) having a sequence at least 95% identical to the sequence of SEQ ID NO:174;
nnnn) a malate: quinone oxidoreductase (Mqo, EC 1.1.99.16) having a sequence at least 95% identical to the sequence of SEQ ID NO:176;
oooo) the E1p subunit of a pyruvate dehydrogenase complex (AceE, EC 1.2.4.1) having a sequence at least 95% identical to the sequence of SEQ ID NO:178;
pppp) a citrate synthase (GltA, EC 4.1.3.7) having a sequence at least 95% identical to the sequence of SEQ ID NO: 180;
qqqq) a malate dehydrogenase (Mdh, EC 1.1.1.37) having a sequence at least 95% identical to the sequence of SEQ ID NO:182; and
rrrr) a UDP-N-acetylmuramoylalanyl-D-glutamate-2,6-diaminopimelate ligase (MurE, EC 6.3.2.13) having a sequence at least 95% identical to the sequence of SEQ ID NO:184.

The application's sequence listing, which the Patent Office published only in electronic form, follows.

SEQUENCE LISTING (202 sequences)

SEQ ID NO: 1 - DNA, 1219 bp, Corynebacterium humireducens
  CDS (301)..(918): gene mcbR
ctactcggtggcttcctcctcagcctcctgggggtcgacgtggccggcggaggcctgatcttcagcttcctcacctgtctgctcggtgcggtgatcctgctgaccatcgtcaacatggtgaccggtcgcagccggagctagcctgcgggtccccgcatgaacccgcccctcggggcgggttttttcatgcccgtatgcagggcgactgtcaaaagacgtaccggtttgtctatattgtgtgggagaggtagtcccgaacgatcccggaaaggaaccggtacccacgtgtccgcaggaacagtgaggaagaagacgacgaccgcgcggcgtcgcaaccgaccgagcccgcgtcagcgactgctcgactcggcgaccaacctgttcaccacggagggcatccgggtcatcggcatcgaccggatcctgcgggaggcggacgtcgccaaggcgtccctgtactccctcttcggctcgaaggacgccctggtcatctcctacctggagaacctcgacgagcagtaccggacggcctgggaggagcggacgaaggggatgacggacgccgaggacaagatcctcgccttcttcgacctcgccatcgcggaggagccgggcaaggagttccgcggctcccacttccagaacgccgccaacgagtacccgcgcccggagaccgagtccgagcacggcatcgtcgccgcctgccgggagcaccgccgctggatgcaccagacgatgacggacctgctcaccgcgaagaacggctacccctccgccacgcaggcgaaccagctgctcatcttcctcgacggcggcctggcgggcgcgcgcttcgcccgggaggtcactccgctgcagacggcccgtgatctggcccgtcagatgctgtcggctcctccggcggactactcgatctagcgttcttccgcgcctccagcttcgccctccaccgctcgacgcgggcgttcgtctcctcccgctgcagggcgctgcgggcctgctgacgctccttctcgagcgccttccgctccgccttctccgccgccagccgctcgcgacgttcggccttctcggccttcagttcgcggctgatctcggggatccgccacggctgcacggcgcccactgctttccgacgccgcgcgtcccacttcacctgccgcgcctcacgcgccgccgcccgggccttctcccggccctgccggtgcagctcgtggaa

SEQ ID NO: 2 - protein, 205 aa, Corynebacterium humireducens
VRKKTTTARRRNRPSPRQRLLDSATNLFTTEGIRVIGIDRILREADVAKASLYSLFGSKDALVISYLENLDEQYRTAWEERTKGMTDAEDKILAFFDLAIAEEPGKEFRGSHFQNAANEYPRPETESEHGIVAACREHRRWMHQTMTDLLTAKNGYPSATQANQLLIFLDGGLAGARFAREVTPLQTARDLARQMLSAPPADYSI

SEQ ID NO: 3 - DNA, 1527 bp, Corynebacterium humireducens
  CDS (301)..(1227): gene thrB
agaacacctacgcgaacctgccgatcgccgacctcggcgacgtgcgcacccgctaccacatcgacatggaggtcgaggaccgcaccggtgtcctcgccgagctgtccgcgatcttcgccacccacgacatctccctcaagaccgtccgccaggaggaggccggcgaccacgcccgcctcatcgtcgtcacgcattccgcacgtgaggccgacctggccgccaccgtcgaggacctgaagaaggccccggcggtcaagtccgtcgacagcgtcctgcgactcatctagggagcgttgagctgtgagcatccagcttgaggtgggcacccgggccaccgtcaccgtccccggctcctccgcgaacctgggccccggattcgacaccctcggcctggccgtgggcatctacgacaccgtcgaggtcgaggtcatcgagtcgggcctcgaggtcgaggtcttcggcgagggcgaggacgacctgccccgcgacggttcccacctggtggtcaaggccatccggtcgggcctcaacgccgcccacgccgaggccccgggcctgcgcgtggtgtgcaccaacgccatcccgcagtcccgtggcctgggctcctccgccgccgcagccgtcgcgggagttctggccgccaacggtctggcgggcaacccgctgaccaccgaccaggtggtccagctgtcctccgccttcgaggggcaccccgacaacgccgcggcctccgtcctcggttccgccgtggtctcctggaccacgaccccggtcgacggctcgcagccggggtaccgggcggtggcggtggacgtcgacaagcgcatccgggcgacggctctcgtgccggacttccacgcctccacccaggcggtgcgtcgcgtgctgccgagccacgtcacccacacggacgcgcgtttcaacgtctcgcgcaccgcggtgatgaccgtggcgctgcagaaccacccggagctgctgtgggagggcacccgtgaccgcctgcaccagccctaccgcgccgacgtgctgccggtgaccgccgagtgggtcaaccgtctgcgcaaccgcggttacgccgcgtacctctccggcgccggcccgacctgcatggtcctgtcggtcgacccgatcgaggaggccatcctcgaggaggcccgcgccgccggtctgcgcgtcctcgagctggaggtcgccggtccggcgaccgtcgaggtcagccgggtctgacctaccggtcgtcggcgggggtccccctgtcggcgaccaccgagcacgcgcccgagggctggaaggggcgcaggctcagccggacgggggcggagccgacggactcctgcaggaaaccctcgtggatggcgcagatcatgagcgagggtcggtgcccctcggcgacgaaggggcacgcctgcagctcgatgtcgaccgactccgcgtcggtgcccccgtcgccctgctccctgcgcatggtcgggtcgaaacccagctcacggagggtgtggtggagacggtcgagcgccgtgtccatgg

SEQ ID NO: 4 - protein, 308 aa, Corynebacterium humireducens
VSIQLEVGTRATVTVPGSSANLGPGFDTLGLAVGIYDTVEVEVIESGLEVEVFGEGEDDLPRDGSHLVVKAIRSGLNAAHAEAPGLRVVCTNAIPQSRGLGSSAAAAVAGVLAANGLAGNPLTTDQVVQLSSAFEGHPDNAAASVLGSAVVSWTTTPVDGSQPGYRAVAVDVDKRIRATALVPDFHASTQAVRRVLPSHVTHTDARFNVSRTAVMTVALQNHPELLWEGTRDRLHQPYRADVLPVTAEWVNRLRNRGYAAYLSGAGPTCMVLSVDPIEEAILEEARAAGLRVLELEVAGPATVEVSRV

SEQ ID NO: 5 - DNA, 2238 bp, Corynebacterium humireducens
  CDS (301)..(1938): gene pgi
caggcgatgtaggactcctcgtcggcccagcgggtgaccacgaagtagcggttctccccggccacggggcggagaagctggaaaccctcgaagccgggtgcctggtcgacggcgttcttccgggcggcgaagcgctcctccagctgcgggccggcgccctcggggacggtgatggcgttgattttcacgatgctcatgccccccattgtgcccaaccggccgcttccccggcggacacccgggaaagtcactagattcgtgagtgtcccgaacatatccccgcattgaggagcccgacccatggccgacatcaccacctccgctgaatggaagaacctggagtccgagttcgagcgcacccagggtcagaccctgcgggagctgttcgccgcggatccgcagcgtgcggagaagctgaccttcgatgcggccggtctccacgtcgacctctccaagaacctgcttgacgacgccaccgtggcctccctcgtcgccctcgccaaggaggcgcagctcaccgaggccatcgaggcgatgttcagcggcgtgcacatcaacaacaccgaggaccgcgccgtgctgcacaccgccctgcgtctgccggtcgaggaggacctcgaggtcgacggccaggacgtcgccgccgacgtccacgaggtgctcggccgcatgcgcgacttcgcctcctccctgcgtgcgggcacctggctcggccacaccggccgcaccatcaagaaggtcgtcaacatcggcatcggcggctccgacctgggcccggccatggccgcccgggcgctgcgctcctacgccaccgccggcatcaccgccgagttcgtctccaacgtcgacccggccgacatgtccgccaccctcgacgagctcgaccccgagtcgaccctgttcatcatcgcctccaagaccttcaccacccaggagaccctcgccaacgcgcacgccgcgaagcgctggctgctgcaggccttcgacggggacgagtcggccgtcgcgaagcacttcgtggcggtgtccaccaacgcccagaaggtcgccgagttcggcatcgacaccgacaacatgttcggcttctgggactgggtaggcggccgctactccgtcgactccgccatcggcctgtccctcatggccgtcatcggcccgctggacttcatgcgcttcctcgagggcttccgcgccatggacgagcacttccgcgcgacccccttcgagaagaacgtgcccgtcctcatggcgctgctgggcatctggtacgtcaacttccacggcttcgagacccacgcggtcctcccctactctcaggacctctcccgtttcgccgcctacctgcagcagctgaccatggagtccaacggcaagtccgtccgacacgacggcaccgccgtcgactacgccaccggtgagatctactggggcgagccgggcaccaacggccagcacgccttctaccagctcatgcaccagggcacccgcgtcgtcccggccgacttcatcggcttcgcccgcccgaagaacgacctgccgaccgccaccggcgagggctccatgcacgacctgctcatgggcaacctcttcgcccagagcaaggtgctggccttcggcaagaccgccgaggagatcgccgccgagggagtgtccgcggacctcgtcgcccacaaggtcatgccgggcaaccgcccgtccacgaccatcctcgcggaggagctcaccccggcggtgctcggcgcgctcatcgccctctacgagcacatcaccttcgtccagggcgtcatctgggacatcaactccttcgaccagtggggcgtggagctgggcaagcagcaggccaaccagctggccgccgccgtctccggcgccgaggaggtcgactccggcgactcctccaccgacgcgctcgtgcgctggtaccgcgcgaaccgctagttcggcagggccggcatcccgaggggggtgccggccctctgcttctcgacgtcgccccgttccccgtaactgaaccggaactcgtggaacggcaggttcacggtctccaggtggtagaaggcgttccgggcgtgcttggagtagtggtactcgcgggcccggagggtggtcaccgacagcaggttgccgtagccgggcagcagcaggtgcgcgtactgccggaggaagggcaccaggtcgaggctccatccctcccccgtgcgggtcagttccgccgggtacaggtcgacggtggccacg

SEQ ID NO: 6 - protein, 545 aa, Corynebacterium humireducens
MADITTSAEWKNLESEFERTQGQTLRELFAADPQRAEKLTFDAAGLHVDLSKNLLDDATVASLVALAKEAQLTEAIEAMFSGVHINNTEDRAVLHTALRLPVEEDLEVDGQDVAADVHEVLGRMRDFASSLRAGTWLGHTGRTIKKVVNIGIGGSDLGPAMAARALRSYATAGITAEFVSNVDPADMSATLDELDPESTLFIIASKTFTTQETLANAHAAKRWLLQAFDGDESAVAKHFVAVSTNAQKVAEFGIDTDNMFGFWDWVGGRYSVDSAIGLSLMAVIGPLDFMRFLEGFRAMDEHFRATPFEKNVPVLMALLGIWYVNFHGFETHAVLPYSQDLSRFAAYLQQLTMESNGKSVRHDGTAVDYATGEIYWGEPGTNGQHAFYQLMHQGTRVVPADFIGFARPKNDLPTATGEGSMHDLLMGNLFAQSKVLAFGKTAEEIAAEGVSADLVAHKVMPGNRPSTTILAEELTPAVLGALIALYEHITFVQGVIWDINSFDQWGVELGKQQANQLAAAVSGAEEVDSGDSSTDALVRWYRANR

SEQ ID NO: 7 - DNA, 2430 bp, Corynebacterium humireducens
  CDS (301)..(2130): gene pck
cgctatgacatctggactacagacccgcaccgcgcggcctggggtctggcggtcccggaacctgtgaaacctcagtcagaggggcccctggcgtggggtttagccggtatggtcacccccgaaagtgtggcctccaaccagggcatttccggggaaaaggcacggtggcggcggatcgacggcggataaacccgctggatatgacctgtgacccgtacctcatgtcctgtgagaccgtcacaaccgcgatttaatggataccctgtatagagagaactgccgcaaacgtcaggagaacacatgaccactgccatcaagggcctcgtcggccccgcaccgaccgataacgagaagctcctcacctggatcgccgaggcagtggagctgatgcagccggagaaggtcgtcttcgccgacggctcccaggaggagtgggaccgcctctccgccgagctcgtggaggcaggcaccttcatccgcctcaacgaggagaagcgcccgaacagcttcctggcccgctccaacccggacgatgtcgcccgcgtcgagtcccgcaccttcatctgctccgagaaggaggaggacgccggcccgaccaacaactgggcggacccggtcgagatgaagaaggagatgaccgaggtataccgcggctccatgaagggccgcaccatgtacgtcgtgccgttctgcatgggcccgatcaccgacccggagccgaagctcggtgtccagctcaccgactccgcctacgtcgtcctctccatgcgcatcatgacccgtatgggctccgaggcgctcgagaagatcggcaccgacggcgatttcgtccgcgcactccactccgtcggcgccccgctggagccgggccaggaggacgtcatctggccgtgcaacgacaccaagtacatcacccagttcccggagaccaaggagatctggtcctacggctccggttacggcggcaacgccatcctggccaagaagtgctacgccctgcgcatcgcctccgtcatggccaaggaggagggctggatggctgagcacatgctcatcctgaagctcaactccccggagggcaagagctaccacatcgcggcagctttcccgtccgcctgcggcaagaccaacctcgccatgatcaccccgaccatcgagggctggaccgccgaggtcgtcggcgacgacatcgcctggctcaagctgcgcgaggacggcctctacgccgtcaacccggagaacggcttcttcggcgtcgcaccgggcaccaactacgcctccaacccgatcgccatggagaccatggagccgggcaacaccctgttcaccaacgtcgcactgaccgacgacggtgacgtctggtgggagggcatggacggcgagaagccggagcacctcatcgactggctgggcaacgactggaccccggagtccggcaccaacgccgcacacccgaactcccgctactgcgtggccatcgagcagtgcccggtcgccgcaccggagttcaacgacccgaagggcgtcaagatcgacgccatcctcttcggtggccgtcgtgccgacaccgtcccgctggtcacccagtcctacgactgggagcacggcaccttcatcggtgcgaccctggcctccggccagaccgccgcatccgctgaggcgaaggtcggctccctgcgccacgacccgatggccatgctgccgttcatgggctacaacgccggtgactacctgcagcactggatcgacatgggcaagaagggcggcgaccgtatgccggccatcttcctggtcaactggttccgccgtggcgaggacggccgcttcctgtggccgggcttcggtgacaactcccgtgtcctgaagtggatcattgaccgcatcgagggcaaggtcgacgccgaggagaccgtcgtgggccacaccgcccgcgccgaggacctcgacctgaccggcctggacaccccgctcgaggacgtcaaggaggccctgactgcgccggccgcagactgggagcgcgacgtcgccgacaacgaggagtacctggcattcctcggcccgcgtgtcccgaacgaggtccacgagcagctgggcaagctcaaggagcgcatcgaggcgaacaagaactagttcgtctcccctcagaacttccaccctccaggttgactcagtccctggggggtgggattttttctgccccggtcgcaccgtaagtccgagagaggatgttcgagaggagagtcctctcgaacgtgcgggacccccgcgggactcctctcgacgatgtgatctcgacgtcagggaagaggggggaaggggaacgccgtcagtgcttccgcagcacgaccaccaggttcgacacgaggaactcccgcagcagcggcacccgcaccatccaccacgcccacgaggggtggtagcgggggaagg

SEQ ID NO: 8 - protein, 609 aa, Corynebacterium humireducens
MTTAIKGLVGPAPTDNEKLLTWIAEAVELMQPEKVVFADGSQEEWDRLSAELVEAGTFIRLNEEKRPNSFLARSNPDDVARVESRTFICSEKEEDAGPTNNWADPVEMKKEMTEVYRGSMKGRTMYVVPFCMGPITDPEPKLGVQLTDSAYVVLSMRIMTRMGSEALEKIGTDGDFVRALHSVGAPLEPGQEDVIWPCNDTKYITQFPETKEIWSYGSGYGGNAILAKKCYALRIASVMAKEEGWMAEHMLILKLNSPEGKSYHIAAAFPSACGKTNLAMITPTIEGWTAEVVGDDIAWLKLREDGLYAVNPENGFFGVAPGTNYASNPIAMETMEPGNTLFTNVALTDDGDVWWEGMDGEKPEHLIDWLGNDWTPESGTNAAHPNSRYCVAIEQCPVAAPEFNDPKGVKIDAILFGGRRADTVPLVTQSYDWEHGTFIGATLASGQTAASAEAKVGSLRHDPMAMLPFMGYNAGDYLQHWIDMGKKGGDRMPAIFLVNWFRRGEDGRFLWPGFGDNSRVLKWIIDRIEGKVDAEETVVGHTARAEDLDLTGLDTPLEDVKEALTAPAADWERDVADNEEYLAFLGPRVPNEVHEQLGKLKERIEANKN

SEQ ID NO: 9 - DNA, 1461 bp, Corynebacterium humireducens
  CDS (301)..(1161): gene metQ
aagctgtaggagctcacggcgtggagctccgcgaaggggagggcggagggggcgacggggcggcgtcggcaagcaccctccccgagatggccgaccgggacgggcgtggggcccgggcggccggagaggatgcgctccagccgcgaccagccgaggtgtgccccaccgtggaatcccatgccccgcaatctacccctgatcgaacagatgtgccacactgcccgcggcaaggactagacagagcggtacgcccggtgctaggtttcagaaccaacgaaccgaacacgtaaggacaccaccatgactttccgtcgcctcctggccggcaccgccgccgccgtcatcgcctccgtgggcctcgtcgcctgcggctccggctcctccggggagaccgtccgcatcggcaccaccgacgcccagctcaaggagtgggacgtcttcgccgacatcgtcgaggcggagggcatcgacatcgagatcgtgccgttctccgactacaacaccccgaacgacgcgctcgtgcagggtgagatcgacgtcaacaagttccagcacctggacttcctcgcctcctacaacaaaggcgccaacgccgacctcgtgccgtacgccgccaccgagatcaacccgctgtccctgttctggaaggaccacgactccctcgacggcatcgagggcgagggcgtcgtcatccccaacgacgacaccaaccagggccgcgccatcaacgtcctcgcccaggccggtctggtgaccctgcgcgacgacagcgtctacaacccgaccccggccgacgtcgacaccgagaagtccaaggtctccatcgtcaccgtcgacgccgcccagaccaccaccgcctaccacgagggtcgcccggccatcatcaacaactccttcctggagcgcgccagcatcgacccgtccctcgccatcttccaggatgacccgagcaccgagcaggccgagccgtacatcaacgcctgggtgaccacccgcgacaaggccgacgacgagaccctcatccgtctcgccgagctgtggaaggacccggccgtcaccgccgccgtcctggagacctccggcaacaccgccgtcaccgtcgagcgctcgcccgaggagctcgccgcgatcatggagcgcctcgcggcccgcgagcagtaggccgcactccgcccacctgccccgtcgcgttcccgcggcggggtttagcatttacctgaccagtccccctcccagaacggcccccagaacaccgtgaccgaacctgtgaccgcaccacccacccggccgcgtaccggtacccgcatcgagttccgcgatgtgaccaaggtcttcaccaaccagcggaagaccgagacccgcgccgtcgacggcgtcaccctgaccgtcgaacccggcgagatcctcggcgtcatcggctactccggcgccggcaagtcgacgctcgtccgcctcatcaac

SEQ ID NO: 10 - protein, 286 aa, Corynebacterium humireducens
MTFRRLLAGTAAAVIASVGLVACGSGSSGETVRIGTTDAQLKEWDVFADIVEAEGIDIEIVPFSDYNTPNDALVQGEIDVNKFQHLDFLASYNKGANADLVPYAATEINPLSLFWKDHDSLDGIEGEGVVIPNDDTNQGRAINVLAQAGLVTLRDDSVYNPTPADVDTEKSKVSIVTVDAAQTTTAYHEGRPAIINNSFLERASIDPSLAIFQDDPSTEQAEPYINAWVTTRDKADDETLIRLAELWKDPAVTAAVLETSGNTAVTVERSPEELAAIMERLAAREQ

SEQ ID NO: 11 - DNA, 2259 bp, Corynebacterium humireducens
  CDS (301)..(1959): gene metP
tcaatcgtcgcgaaggggtagttcgcggcgagaacatcgtttcgggtcagggcattgaagagggtggacttgccgacgttgggcagaccgacgattccaagagtaaggctcacgggcgtagatcctagcagccagcggttttgcctctccggtcagcgcccgtacctgtgttgcgggatgatacggacgtcattatatgatcaggccacttcaacgataaatacgtcgcaccctggacgttttcctctccctaaccatcgggagccaactacacatcctccacctcagacaggtatacacatgtcttcgaccaccccgcagcccgcgccgtcgggccaggagcagggcgagcggcgcgagatcttctcgtcccgttgggcgttcctgctggccgccatcggctccgccgtcggcctgggcaacatctggcgcttcccctacgtcgcttacgacaacggcggcggcgccttcctcatcccctacctcgtggcactgctgtccgctggtatcccgctgctcttcctcgactacgccctgggccaccgctaccgtggttccgccccgctggtgttccgtcgcatcaagtcctgggctgagccggtcggctgggtccaggtcggtgtgtcctttttcatcactatctactacgccgcgatcatcggctgggccgcgctctacgcggtcaagtccttcaacaaggcgtggggcaccgacccgaacagctacttcttcggcgatttcctccagttcgacgagaccgccaccttctccaccgacttcgtcccgcagatcgccctggccctggccggcgtgtggatcgccgcgatcatcgtgctggcgatcggcgtggacaagggcatcggcaaggtctccaagatcttcatccccctgctggcggtcctcttcctcatcgtcgtagtccaggcgctcatgctgccgggtgccgccacgggtctcgacgccctgttcaccccggactggaacgccctgaccaacggcactgtgtggatcgccgcctacggccagatcttcttctccctgtccgtgagcttcggcatcatgctcacctactcctcctacctgcgtccgcgcaccaacctgacgggcaccggcctgaccaccgccttcgcgaactcctccttcgaggtcctcgccggcgtcggtgtcttcgccgccctgggcttcatggccgtgcagcagtcggtcgccgtcgacgaggtcgcgacctcgggcatcggtctggccttcgtggccttcccggcgatcatcaacgagatggccttcggcccgatcttcggcgtcctgttcttcggctccctcaccatcgccggcttcacctcgctgttctccctgctcgaggtcgtcgtctccgccgtcaaggacaagctgaacctgccgcgcaagaccgtcgccatcggcatcggcaccttcatggcgctgatctccctggcgctgttctccacgacgtccggcctcatggccctggacatcatggacaagttcaccaacaacatcggcatcgtcgccatcgccctgatcgcggtcatcatcctcgattgggtcctgcgccggatcgacgagttctcgctccacatcaacgccgtgtcctccttcaaggtgggcacgctgtggcgcatcttcgtggtcaacgtcaccaccctggtgctgggattcaccctggcgcaggagctcatctccctgatccaggagccctacggcggctacacgacgacgcagatcgccatctacggctgggccgtcctggcgctcatcggtatcaacgccctcgtcttctccctggtgccgtggcgcggcaacctgccgctcaacggtccgccgggctccgacttcggtgttgacccggaggtccaccgcgagctccacgcgccgcgcaagtacaacggtgaccaccgggtgggcgtcgacaagcacaccaccgaggaaggaacgatccgatgagcggtctcgcaatcatgatgatggtcctgttcatggtcgtcatctggggtggtttcatcgccagcgccctgcacctgcgggcgaaccccgatgacacctccggcgccctgggcgtcgcggaccatgcgcgcgacgagcacctcgccgcgcaggaactccactagtcacaccacaccgggatgtcaggcaatatggagtctgtgactgaccagccgacctcccgcatccccggggacgagactcccccgaccggctcctccggcgacgccgggtccaccgccttcggcagcatggacctgg

SEQ ID NO: 12 - protein, 552 aa, Corynebacterium humireducens
MSSTTPQPAPSGQEQGERREIFSSRWAFLLAAIGSAVGLGNIWRFPYVAYDNGGGAFLIPYLVALLSAGIPLLFLDYALGHRYRGSAPLVFRRIKSWAEPVGWVQVGVSFFITIYYAAIIGWAALYAVKSFNKAWGTDPNSYFFGDFLQFDETATFSTDFVPQIALALAGVWIAAIIVLAIGVDKGIGKVSKIFIPLLAVLFLIVVVQALMLPGAATGLDALFTPDWNALTNGTVWIAAYGQIFFSLSVSFGIMLTYSSYLRPRTNLTGTGLTTAFANSSFEVLAGVGVFAALGFMAVQQSVAVDEVATSGIGLAFVAFPAIINEMAFGPIFGVLFFGSLTIAGFTSLFSLLEVVVSAVKDKLNLPRKTVAIGIGTFMALISLALFSTTSGLMALDIMDKFTNNIGIVAIALIAVIILDWVLRRIDEFSLHINAVSSFKVGTLWRIFVVNVTTLVLGFTLAQELISLIQEPYGGYTTTQIAIYGWAVLALIGINALVFSLVPWRGNLPLNGPPGSDFGVDPEVHRELHAPRKYNGDHRVGVDKHTTEEGTIR

SEQ ID NO: 13 - DNA, 1650 bp, Corynebacterium humireducens
  CDS (301)..(1350): gene metN
ccgtacatcaacgcctgggtgaccacccgcgacaaggccgacgacgagaccctcatccgtctcgccgagctgtggaaggacccggccgtcaccgccgccgtcctggagacctccggcaacaccgccgtcaccgtcgagcgctcgcccgaggagctcgccgcgatcatggagcgcctcgcggcccgcgagcagtaggccgcactccgcccacctgccccgtcgcgttcccgcggcggggtttagcatttacctgaccagtccccctcccagaacggcccccagaacaccgtgaccgaacctgtgaccgcaccacccacccggccgcgtaccggtacccgcatcgagttccgcgatgtgaccaaggtcttcaccaaccagcggaagaccgagacccgcgccgtcgacggcgtcaccctgaccgtcgaacccggcgagatcctcggcgtcatcggctactccggcgccggcaagtcgacgctcgtccgcctcatcaacgggctggactccacaacctccggccagctgcttctcgacggcaccgacatcgtcggactccccgagtccaagctgcgctcgatccgccggggcatcggcatgatcttccagcagttcaacctcttccagtcccgcacggccgccggcaacatcgcctacccgctggagctggccggcatgccgcgcgcggagcggcggcggcgcgtcgccgagctcctcgacttcgtcggcctgggcgacaagggcgacaactacccggagcagctgtcgggcggccagaagcagcgcgtcggcatcgcccgcgccctggccaccaacccgcggctcctgctcgccgacgaggccacctcggccctcgacccggagaccacccaggacgtgctcgacctgctccgggagatcaaccgcgagctgggcatcaccatcgtcgtaatcacccatgagatggacgtcgtgcgttccatcgccgacaaggtcgccgtcatggaggccggccgggtggtcgagcacggcagcgtctacgaggtgttctcccgcccgcagactgcggtggcgcggcgcttcgtgtccacctcgctgcgcaacacccccgaccaggtcgaggcggaggacctgctggcccacgagggccgcctgttcaccatcaccctcacggaggactccgggttcttcgccgcggccgccgccggccgtgaggaggggatgctcatcaacatcgtccacggcggcgtcaccacgctgcagcggcagtccttcggcaagatgaccgtccgggtgacggggccggacgcggccgtcgagaagttccgtgacacgctgtcccgcaccaccgacatccaggagatcacgcgatgaacgagaccctcctcgccgcagactggaaccgtctcggcccgaccttcatcgacgccatcggcgacaccctcgtcatggtgtccctcacgatggtgctcggcggcctcggcggcctgctcatcggcctgctgctgtacacgtcccgcgcgggcggcatcctgcagtcgaagccgctgtactggacgctcaacatcctggtgaacttcgtccgcccgatccccttcatcgtgctcatcgccatgctggcgccggtgacggtccaggtcgtgggcaccaccatcggccggtccgcggcgatct

SEQ ID NO: 14 - protein, 349 aa, Corynebacterium humireducens
VTAPPTRPRTGTRIEFRDVTKVFTNQRKTETRAVDGVTLTVEPGEILGVIGYSGAGKSTLVRLINGLDSTTSGQLLLDGTDIVGLPESKLRSIRRGIGMIFQQFNLFQSRTAAGNIAYPLELAGMPRAERRRRVAELLDFVGLGDKGDNYPEQLSGGQKQRVGIARALATNPRLLLADEATSALDPETTQDVLDLLREINRELGITIVVITHEMDVVRSIADKVAVMEAGRVVEHGSVYEVFSRPQTAVARRFVSTSLRNTPDQVEAEDLLAHEGRLFTITLTEDSGFFAAAAAGREEGMLINIVHGGVTTLQRQSFGKMTVRVTGPDAAVEKFRDTLSRTTDIQEITR

SEQ ID NO: 15 - DNA, 1854 bp, Corynebacterium humireducens
  CDS (301)..(1554): gene metK
gacggacagaccagcgcgctcgagtacgcgcaggccaagctcacccgcaagggctgcgacctgctcatggccaacgaggtgggggagggccgggtcttcggccagacccgcaacagcggctggctgctcaccgccgacggcgctgtcacggaggttccggacggttccaagcacgtggtggcggcggcgatcctcagcgccgtcgacgacctgcgcaattgacgcttttagaccgcttggtctatattgggcgggacgctcagtcatatcattaatttgacccccgaaaaggacccgcccgtgtcagagaaccccgccaccaccacggtggccttcgacaagcccgccacgatccgcctgttcaccagcgagtccgtcaccgagggccacccggacaagatctgcgacgccatctcggacaccatcctcgacgccatgctcgagcaggacccgaccgcgcgcgtggccgtcgagacgctcgtgaccaccggccaggtccacgtcgtcggtgaggtccgcaccaccggctacgtcgagatcccgcagctcgtgcgcaagaccctcgtggacatcggcttcatctcctccgaggtcggcttcgacggcaccacctgcggcgtcaacatcgccatcggcgagcagtcccaggagatcgccgacggcgtcgactcctcccacgaggagcgttccggcgtcgagatcgacgaggacgaccgcgccggcgccggcgaccagggcctcatgttcggctacgccagcaacgagacccccgagtacatgccgctgcccatcgccctggcccaccgcctggcccgccgcctcaccgaggtgcgcaaccagggcatcgtcccgcacctgcgtcccgacggcaagacccaggtcaccttcgcctacgacgagcaggaccgcccggtccgcctcgacaccgtggtcatctccacgcagcacgacccggaggtcacccaggactggctgcacgagcagctgcgcgagcacgtcctcgactgggtcatcgccgacgccggcctgatcggcatggtcgacgaggagctcaccctcctggtcaacccgtccggctccttcatcctcggcggcccgatgggcgacgctggcctgacgggccgcaagatcatcgtcgacacctacggcggcatggcccgccacggcggcggcgccttctccggcaaggacccgtccaaggtggaccgttccgccgcgtacgccatgcgctgggtggccaagaacatcgtcgccgccggcctggccgagcgcgtcgaggtccaggtggcctacgccatcggccgcgcgaagccggtcggcctctacgtggagtccttcggcaccgccgccgcgggcctcagtgacgcggacatccagggcgccgtcgagaaggtcttcgacctgcggcccgccgccatcatccgcgagctcgacctgctgcgcccgatctacgcgcagacctccgcctacggccacttcggccgcctcgacctggatctgccctgggagcggctcaaccgggtggacgagctcaaggcggctctgggccgctagagtattcggcatggcctccccccgcgtccccgcagaacacctgccggtggcgcgggttctgcctctcctgggcctggcccacctcgaccggcccttcgactaccaggtgccgtcgacgctggatgacgacgcccagcccggcgtccgcgtccgcatccgcttcgccgggcggcttgtcgacgccgtcctcctcgaacgccgcgccgacaccgagcacgagggcgggctgagctggatcgagcgggtgatctccccgcacgtcgtgtacccgccgcgcaccgcccggctcatcgaggcgct

SEQ ID NO: 16 - protein, 417 aa, Corynebacterium humireducens
VSENPATTTVAFDKPATIRLFTSESVTEGHPDKICDAISDTILDAMLEQDPTARVAVETLVTTGQVHVVGEVRTTGYVEIPQLVRKTLVDIGFISSEVGFDGTTCGVNIAIGEQSQEIADGVDSSHEERSGVEIDEDDRAGAGDQGLMFGYASNETPEYMPLPIALAHRLARRLTEVRNQGIVPHLRPDGKTQVTFAYDEQDRPVRLDTVVISTQHDPEVTQDWLHEQLREHVLDWVIADAGLIGMVDEELTLLVNPSGSFILGGPMGDAGLTGRKIIVDTYGGMARHGGGAFSGKDPSKVDRSAAYAMRWVAKNIVAAGLAERVEVQVAYAIGRAKPVGLYVESFGTAAAGLSDADIQGAVEKVFDLRPAAIIRELDLLRPIYAQTSAYGHFGRLDLDLPWERLNRVDELKAALGR

SEQ ID NO: 17 - DNA, 1278 bp, Corynebacterium humireducens
  CDS (301)..(978): gene metI
ggcgcggcgcttcgtgtccacctcgctgcgcaacacccccgaccaggtcgaggcggaggacctgctggcccacgagggccgcctgttcaccatcaccctcacggaggactccgggttcttcgccgcggccgccgccggccgtgaggaggggatgctcatcaacatcgtccacggcggcgtcaccacgctgcagcggcagtccttcggcaagatgaccgtccgggtgacggggccggacgcggccgtcgagaagttccgtgacacgctgtcccgcaccaccgacatccaggagatcacgcgatgaacgagaccctcctcgccgcagactggaaccgtctcggcccgaccttcatcgacgccatcggcgacaccctcgtcatggtgtccctcacgatggtgctcggcggcctcggcggcctgctcatcggcctgctgctgtacacgtcccgcgcgggcggcatcctgcagtcgaagccgctgtactggacgctcaacatcctggtgaacttcgtccgcccgatccccttcatcgtgctcatcgccatgctggcgccggtgacggtccaggtcgtgggcaccaccatcggccggtccgcggcgatcttcgtcatgtgcatcgccgccgccttcgccgtggcccgcatcgtcgagcagaacctcgtggccatcgaccccggcgtcatcgaggccgcccgcgccatgggggcggggccgtggcggatcatccgcacggtgatcatcccggaggccctcggcccgctggtcctcggctacacgttcatcttcatcgcggtggtcgacatgtccgcgatggccggctacatcggcggtggtggcctgggtgacttcgccatcgtctacggctaccgcgcctacgacctggaggtcacgtacgcggcggtcatcgtcatcgtcatcatcgtgcagatcgcgcagctgctgggcaactggctctcgcgaaagctcatgcggcgttagcgtcgcccgccgttcacacccccgaccccgtgtcgggggttttgcgtacccggagccgaaacgggggctcccgatcgagaacacgtcggggcgacgacctgccgtgcggaagtacccttctgcccgctcgaccgcactgtttccccaggacacaacctggcctgcagacacagacgggtacctcagaacgcagctagcctggatgtcatgaagatcgccgccttcgacatcgacgacaccctgctgttcccccacggcatcgccgaggaggacatccgcgccatccgcgcctggcaggag

SEQ ID NO: 18 - protein, 225 aa, Corynebacterium humireducens
MNETLLAADWNRLGPTFIDAIGDTLVMVSLTMVLGGLGGLLIGLLLYTSRAGGILQSKPLYWTLNILVNFVRPIPFIVLIAMLAPVTVQVVGTTIGRSAAIFVMCIAAAFAVARIVEQNLVAIDPGVIEAARAMGAGPWRIIRTVIIPEALGPLVLGYTFIFIAVVDMSAMAGYIGGGGLGDFAIVYGYRAYDLEVTYAAVIVIVIIVQIAQLLGNWLSRKLMRR

SEQ ID NO: 19 - DNA, 1509 bp, Corynebacterium humireducens
  CDS (301)..(1209): gene dapA
ggcaggccgcccgcgcggtgctgccgaacgccacggagtcacgcatcgtcgtcaccggcaactaccgggcgtggcgccacttcatcggcgcccgggccaccgagcacgcggacgtcgagatccgggcactggcggtggcgtgcctccgcctcctcgcgcagcagtccccggtgctcttcgccgatttccagatctccactctctccgacggcacagagatggccgtcagtccctacgccaccgacttctgaccagcgagggattccccagcggaaaggtaaacaggtaaccttgaacaccatgagtacaggtatgacttcgaagaccggagtcgaggacttcggtaccgtctgcgtcgccatggtcacgcccttcgaccgggacggcgccctggacctcgaggccggtcgccgcatcgcggcccacctcgtcgacaacggtctggacgccctcgtgctcgcaggcacgaccggtgagtccccgaccaccacgctcgacgagaagatcagcctgctcaaggcggtgaaggaggaggtcggcgaccgctgcaagctcatcgcgggtgccggcaccaacgacaccgcctcctccatcgagctcgcccgcgcctccgccgaggccggcgccgacgccctgctcgtggtcaccccctactactcgaagccgagccaggagggtgtctaccagcacttcaaggccgtcgccggggccaccgacctgcccatcatgctctacgacatcccgccgcgctcctcgatcccgatcgagggggacaccatccgccgactcgcggagctgcccaccattcgtgcggtgaaggatgcaaagggtaacatggctgagtctgcaccgctcatgcatgagaccggtctcgcctggtactcgggcgatgatccgctcaacgtcccgtggctgtcgctcggcgcctcgggattcgtttccgtggtcggccatgccgcaccccaggcactgcgtgagctgtacacaagtttcgaggaaggcgacctcgcccgtgcgcgggaaatcaacgccactgttctttcaccgctgatcgccgctcagggtcgcctgggtggtgtcagcatggccaaggctgccctgcgtctgcagggcattgaggtgggggacccgcgtctgcctgtcgtcgctcccgacgagcaggagatcgaggccctccgccgtgacatggaaaaggctggagtcctttaaatatgactgaatcccgtagtcgtgcccggaaggtcacccgcaaggcgggcccgccggagaccgagagcactggtgcatccccggttttccaggcaccgaccccggaaacgaacggaaacggcgcatccgccgagaagaagaccaccgaaaggaagtccgcggacaccgacaacgccccgcggggcggcggcaaccgctcccggaacggtggcggccgcgcccgcggcggccgtggtggccgcggcggtcagggtggccagggccagggcggtcagggtggtcagcaggggggacggggac

SEQ ID NO: 20 - protein, 302 aa, Corynebacterium humireducens
MSTGMTSKTGVEDFGTVCVAMVTPFDRDGALDLEAGRRIAAHLVDNGLDALVLAGTTGESPTTTLDEKISLLKAVKEEVGDRCKLIAGAGTNDTASSIELARASAEAGADALLVVTPYYSKPSQEGVYQHFKAVAGATDLPIMLYDIPPRSSIPIEGDTIRRLAELPTIRAVKDAKGNMAESAPLMHETGLAWYSGDDPLNVPWLSLGASGFVSVVGHAAPQALRELYTSFEEGDLARAREINATVLSPLIAAQGRLGGVSMAKAALRLQGIEVGDPRLPVVAPDEQEIEALRRDMEKAGVL

SEQ ID NO: 21 - DNA, 1515 bp, Corynebacterium humireducens
  CDS (301)..(1215): CBS
gggcctccgcgacgggagcgctggaaccaccgcgccaggggccctgtgcctcggccacctgagtggcggacagggtgagggcgacggccagggcggccgcgctgatctgacggtgtcggcgggtgaaagccatgttcatcatctcctatgagctctattggcgtaagggtggatgatagggcagaaaatgcaggttagataccctgccgggtatgggatatctcacgggctgcgacgggaacttcgcggtccggaaaaagttcccgccttcccttgactttgcggcgtaagatgtcatttatgagtctcgagcccgggaacaccccgctcgtacgtctggaccggctccccggccggcccggtgtcaccctgtgggcgaagctggagggccacaaccccagcggcagtgccaaggaccggaccgcgcacgccatcctcgcggcggcggatctgcggcccggcgcggtcatcgtcgagtcgagctcgggcaacctcggcgtcgccctggcccgggaggcggtcctcggcggctggaccttccactgtgtcgtcgatccgaaggcgaatcgctcgaccatcgccaccatgcgcgcgttcggggcggtcgtccacgaggtcaccgcacccgatccggccaccggtgactggctcgccgcccggcgcgcgcgggtcgcggaactgctcaccgagatccccggggccgtctgcctcgaccagtactccaaccgggcggccttcacggcccacgacgagggcacgatggccgagatcgtcgcgcagctcggccacacccccgcgcacctgttcgtggcggtgagcaccaccggcacgatcggcggctgcctgcgccgcatcgcccgggaggggtgggacacggaggtcaccgccgtcgacgccgagggttccgtgcttttcgacggcgcccgtggccgccgccaccttcccggcttcggcgccggcatcgtcccggacctggccgccgaggtgaccccggaccgcatcgtccgggtcggcgaccgtgactccgtcgccgccgcgcggcagctggcccgcacggaaggggtgttgtgcggtgcctcgggtggggcggtggtggcggccgtcgggaagctcctgccggagctgcacggggacgtcgtcctcgtgctccacgacggtggcacccactacctggacaccgtgtacaacgacgactgggtggaggagaacctgtgacaaccgtggtgatcatcggcggcggcccgcgcggactgtgggcggcggaggaactgctgggcctggcacgcgagaggggcgcggccctcgacgtccacgtcatcgacgacggcggaccgcaggcctacgacccggggcagccggaggagtggctcatcaacgtgcgggcctccgtgatccgcacggggctgggctccttcgacgagtggcgcggggccgccgaccccttcccgccgcgacgcgaggtggcccgtttcctcgccgcctcctgggaggagctcgcacagcacgtgtcgccgc

SEQ ID NO: 22 - protein, 304 aa, Corynebacterium humireducens
MSLEPGNTPLVRLDRLPGRPGVTLWAKLEGHNPSGSAKDRTAHAILAAADLRPGAVIVESSSGNLGVALAREAVLGGWTFHCVVDPKANRSTIATMRAFGAVVHEVTAPDPATGDWLAARRARVAELLTEIPGAVCLDQYSNRAAFTAHDEGTMAEIVAQLGHTPAHLFVAVSTTGTIGGCLRRIAREGWDTEVTAVDAEGSVLFDGARGRRHLPGFGAGIVPDLAAEVTPDRIVRVGDRDSVAAARQLARTEGVLCGASGGAVVAAVGKLLPELHGDVVLVLHDGGTHYLDTVYNDDWVEENL

SEQ ID NO: 23 - DNA, 1746 bp, Corynebacterium humireducens
  CDS (301)..(1446): gene cg3031-homolog
cccggagccggagcgcctcaacgtgctcaacaactcgacggtgccgaacctggccgcgcaggtcgcggaccgcctgcgggaggacggtttcgaggtcggggaggtcggcaacctggcggaccacatcctcccggagaccaccgtcttcttccagcccggcaacgccgccgcggagcagcgggcgcgggagctcgccgaccgcctcggcggcgtcgcccgcgagtacgagggcttcctcccggagaacaccgccggtcgcaacgacctgactctggtgctggtgaaccaggtggcgctctgatgggcccggggaccggcatcgagccgatcccgttccgccgctccccgcggccgacgctcggcgtcgagtgggagatcgcgctcatcgaccccgagacccgcgacctggcgcccaaggccgtcgaggtcatcgacctcgtccggtcccgccacccggaggtgcacctggagaaggagttcctgcagaacaccgtcgaactggtcaccggcatccacgaaaccgtgccggaggcggtcgcggaactcgcccgcgacctggccgccgtgaaggaggccgccgccgacctcggactgtgcctgtggtcctccggctcgcaccccttctcggactggcggaagaacccggtcagcgcgaagatggcctacgccgagatcatcgagcgcacccgctactggggttcgcagatgctcatctggggcatccacgtgcacgtcgggatcagccacgaggaccgggtgtggccgatcatcaacgccctgatgacccgctacccgcacctgctggcgctgacggcgtcgtcgccgggctgggacggcatcgacacgggctacgcctccaaccgcacgatgctctaccagcagctgcccaccgccggcctgcccttccagttccggaactgggccgagtgggagtcctacatgcacgaccagggcatctcgggcgtgatcaaccacaccgggtcgatgcacttcgacatccgtcccgccccgaagtggggcacggtcgaggtgcgggtctccgacgccacctccaacctgcgggaactcgccgccgtcgtggcgctcacgcactgcctggtcgtccactacgaccgcatgatcgaccgcggtgaggaactgcccgtcctgcagccctggcacgtcgccgagaacaagtggcgggccgcccgctacgggctggaggcactcgtgatcaccagccgtgacaccgacgagcgctgggtcacccaggagctcgcggagcttgtcgacgaactcgcgcccctcgccaccgaactcggctgcctcgccgaactccagctggtctccgagatcctcgaacgtggcgccggctaccagcgtcagcgtcgcatccacgacgtcaccggcagctggatccccgtcatcgacgccgcctgccgggagatggaggagatggtcccgtgagcgacgtcgtcctcgtccactccaccgggcacctgccggacgtgtggacggaggtggtgcgcgccttcccggccgactggaagccgtggctgcccaatctgggcgtgcagtccctcgagcagtacctggaccggcaggagctgcgccgggtggtgctcgtcggtcacggcaccggcgccctggccgtggcacgcctggcccgggagcagccgcagcgggtcacccacgcggtgctgtccgtgccggaggcgccccgcctcgtgccacgtttcctgcggcgccggcaggaggaggccctgg

SEQ ID NO: 24 - protein, 381 aa, Corynebacterium humireducens
MGPGTGIEPIPFRRSPRPTLGVEWEIALIDPETRDLAPKAVEVIDLVRSRHPEVHLEKEFLQNTVELVTGIHETVPEAVAELARDLAAVKEAAADLGLCLWSSGSHPFSDWRKNPVSAKMAYAEIIERTRYWGSQMLIWGIHVHVGISHEDRVWPIINALMTRYPHLLALTASSPGWDGIDTGYASNRTMLYQQLPTAGLPFQFRNWAEWESYMHDQGISGVINHTGSMHFDIRPAPKWGTVEVRVSDATSNLRELAAVVALTHCLVVHYDRMIDRGEELPVLQPWHVAENKWRAARYGLEALVITSRDTDERWVTQELAELVDELAPLATELGCLAELQLVSEILERGAGYQRQRRIHDVTGSWIPVIDAACREMEEMVP

SEQ ID NO: 25 - DNA, 1731 bp, Corynebacterium humireducens
  CDS (301)..(1431): gene aecD
aggccgaacgcgccgtccaggccggcctggacgagctgatgaaggaccgcaccacgctcatcatcgcgcaccgcctgtcgacgatcgcgggtgtggacaccatcgtcaccctccgcgacggcatggtcgacgaaataggttcaccggaccagctcgccgcctcgggtggcatctacgccgaactcctgcagctcacggcgtcctcctcggccgctgaccgggcccgtctgaagaggtacgggctcgtcgtcgacggtcacggcgacgaggaggacgaggaagaggactagtctgtctggcatgcagttccccaccctcgaccagctcaaggaccgtcgcacccgcaagtggacggtctacgccgacgacgtcctgcccctgtggatcgcggagagtgacttcttcacctgcccgccggtgaagcaggcgatcgcggacgccatcgaccgggagtccttcgggtacaccccggcgacctccgacctgccgcaggcggtctccgacttctacgccgcacgttacggctggcgcccggacccggcgctcatcgtcgcggtccccgacgtcgtccgtggcctggccctcgccatcgagtacatgacgcgcccggactcgggtgtcatcgtgccggtgccggcgtacccgccgttcctggagctgccggaggcgacccgccgtccgatgcaccagatcgacgcctacggcgggatcgacctgggggacgtcgagaagcagttcgcggccggcgccggctcgatcctcctgtgcgccccgaacaaccccctggggtacacgttcgacgcggagttcctgcgggagctgtgcgacctggcggaccgttacgacgcccgcgtgctcgtcgacgagatccacgccccgctggtgttcgacggcacccatgtgtgcgccgccgccgtcagcgagaccgccgcgcgggtgtgcgtcaccgtcacggcgacgtcgaaggcgtggaacatcgcgggcctcaagtgcgcgcagatgatcttctccaacccggcggacatggacacgtggcggtcgatgaccggcgtggccaaggacggcacctccaccctgggcatctgggcggcgatcgcctgctaccgggagggcggcgactgcctcgacgagcaggtcgcgtacctgcgggagaaccgcgactggctggccgaggagctgccgcgccgcgtgccggggctgcaggtgatcagcccggcggcgacctatctcatgtggatggacttctccggcacctccatcgggcacctggagcgcccggcggtgtggctgcgggagaacgcgaaggtcgccctcaacgacggcgtcgccttcggcccgggaggcagccaccacgcgcggctgaacttcgccacgtcccgggagatcctggaggaggcctgcgaccggctggggtctgcattcgcccggtgatttccctaccctggatttcatgactgacgagcgatacgacgacccgtccgccacgaccggcccccagggtcccggactgtccatgggtccgctgggggtcggcgccgaaccggagaagtccccggtccgcccccgtaccgacgccgagggctacctggtcgaaccggagtccgagcagttcgagaccccgaccccggcgcccggtgacgccccctgggagcgccccgagccggagtggtacaaggaggccgtgttctacgaggtcctggtgcgcgccttctacgacccggagggcaccgg

SEQ ID NO: 26 - protein, 376 aa, Corynebacterium humireducens
MQFPTLDQLKDRRTRKWTVYADDVLPLWIAESDFFTCPPVKQAIADAIDRESFGYTPATSDLPQAVSDFYAARYGWRPDPALIVAVPDVVRGLALAIEYMTRPDSGVIVPVPAYPPFLELPEATRRPMHQIDAYGGIDLGDVEKQFAAGAGSILLCAPNNPLGYTFDAEFLRELCDLADRYDARVLVDEIHAPLVFDGTHVCAAAVSETAARVCVTVTATSKAWNIAGLKCAQMIFSNPADMDTWRSMTGVAKDGTSTLGIWAAIACYREGGDCLDEQVAYLRENRDWLAEELPRRVPGLQVISPAATYLMWMDFSGTSIGHLERPAVWLRENAKVALNDGVAFGPGGSHHARLNFATSREILEEACDRLGSAFAR

SEQ ID NO: 27 - DNA, 1632 bp, Corynebacterium humireducens
  CDS (301)..(1332): gene asd
cggctggtccaacgtgctctacgacgaccaggtgggcaaggtctccctcgtgggtgccggcatgaagtcccacccgggcgtcaccgccgacttcgccgaggcgctccgcgacgccggcgtgaacatcgagctaatctccacctcggagatccgcatctcggtgctcacccgcgaggccgacctggacgccgccgcccgtgccctgcacgagaagttcgagctcggcggcgacgccgaggccaccgtctacgccggcaccggccgctagacaatcccttccacagaggagctttcactctcatgaccaccattgctgtcgtcggtgccaccggccaggtcggccgcgtgatgcgctcgatcctggaggagcgcaacttcccggccgacaaggtccgtttcttcgcgtccccgcgctccgcgggcaccgtcatcgagttccgcggtgaggacatcaccgtcgaggacctcacccagatcaccccggagtccgtcaaggacgtcgacatcgccctcttctccgccggtggttccacctcccgtgagtgggccccggtcttcgccgaggccggcgcgaccgtcatcgacaactcctccgcctggcgcaaggacgacgaggtcccgctcgtcgtcgccgaggtcaacggcgaggaggcgaagaacccgtccaagggcatcgtcgccaacccgaactgcaccaccatggccgccatgccggtgctcaagccgctgcacgacgccgccggcctcatccgcctgcatgtctcctcctaccaggccgtctccggctccggcctcgccggtgtggagaccctggcgaagcagaccgccgagctcggtgaggacaacgtcaagctggtccatgacggttccgtcgaggcccccgccgacctgggtccctacgtcgcccccatcgcgttcaacgccctgccgctggccggcgcgctggtcgatgacggctccctggagacggatgaggagcagaagctgcgcaacgagtcccgcaagatcctggacatcccgggtctgcgcgtcgccggcacctgcgtccgcgtgccggtgttcaccggtcacaccctgaccatccacgccgagttcgagcgtccgatcaccgtcgacgaggccaaggccctgctcgccgacgccccgggtgtcgagcttgtcgacgtcccgaccccgctggaggccgccggcaaggacacctccctggtcggccgtatccgccaggaccagtccgtcgacgacaacaagggcctcgtgctcgtcgtctccggtgacaacctgcgcaagggcgcggcgctgaacacggtgcagatcgcggagctgctggtgtagtccaccgcctccactgatatcgggcccctcaccatgttgtggtgaggggcccgttcttgtcggtggtctggtaggggaggccttcattctgtccagacaattcttgtggtgtcctggggcgtcggcatgcggcgtcgggcgggtatcggcgttcccgttcctcgtttggcggttcactgccggacaatggaggattttctcaggaacagggatccctgctgatctcgtatttcgccccggaactccgctggacgctcagcttgtccccagaattggggtctttccgcagcgaattgtgag

SEQ ID NO: 28 - protein, 343 aa, Corynebacterium humireducens
MTTIAVVGATGQVGRVMRSILEERNFPADKVRFFASPRSAGTVIEFRGEDITVEDLTQITPESVKDVDIALFSAGGSTSREWAPVFAEAGATVIDNSSAWRKDDEVPLVVAEVNGEEAKNPSKGIVANPNCTTMAAMPVLKPLHDAAGLIRLHVSSYQAVSGSGLAGVETLAKQTAELGEDNVKLVHDGSVEAPADLGPYVAPIAFNALPLAGALVDDGSLETDEEQKLRNESRKILDIPGLRVAGTCVRVPVFTGHTLTIHAEFERPITVDEAKALLADAPGVELVDVPTPLEAAGKDTSLVGRIRQDQSVDDNKGLVLVVSGDNLRKGAALNTVQIAELLV

SEQ ID NO: 29 - DNA, 1725 bp, Corynebacterium humireducens
  CDS (301)..(1425): gene brnE
gatctcgttggccttgcccgtggcaccgacggcggtgagggcgtcgaggacctcgcgggaggcggcgtcgtcgagaaggacggaggccggcagctccgggccgtcctcaccgcagaggacggggacgagcagtgcgtcgggggtcttcggggccttcttggccagctcgacggcgggggtggtgccgcgggcgggaagggtgaaagtggggttcgccatggaaagtacctcctgagattgacaagcgatgaacccagcttatagagatcacctctgggtcgtcggtgtagcgtgttccccatgacgtctctcaatttcaccgtgaaccgtacgagcaccccgacgtccgatgaggcgcgcgaggagattctgcagaatccgcggttcggcaagaacttcaccgatcacatggtcaccatcgagtggtccgaggacaagggctggcacgacgcccgcgtgcgtccctacgaggccatcccgatggatcccgcgaccacggtgttccactacggccaggcgatcttcgagggcatcaaggcctaccgtcagccggacggctccatcgccaccttccgcccggagcgcaacgccgagcgcatgcagcgttccgccgagcgcatggccatgccgccgctgccgaccgaggacttcctcgagacgctccgcctgcttgtcgacgtcgaccgtgactgggtccccgccgccggcggcgaggccagcctctacctgcgtcccttcatgatctccaccgaggtctccctgggcgtcagcccggccaaccggtacaccttcttcgtcatcgcctccccggtcggggcgtacttcaccggtggcgtcaagccggtctccgtgtggctgagcgaggactacgtccgtgccgccccgggtggcaccggtgccgcgaagttcgccggcaactacgccgcctccctgctcgcgcaggcgcaggcggaggagaagggctgcgaccaggtcgtgtggctcgacgccatcgagcacacctacatcgaggagatgggtggcatgaacctgttcttcgtgtacggctcgggtgacgacgtcaccgtggccacccccgagctctccggctccctcctgccgggcgtcacccgcgactccctcctgcaggtcgcccgcgatctcggccaccgcaccgaggagcggaggatctccaagttcgactggcgcgacgacgtcgcctccggtgcgatgaccgaggccatggcctgcggcacagccgccgtgatcaccccggtcggccgggtcctgtccaacgacggcgagttccagatcaatgacaaccagccgggtgaggtcaccatggccatgcgcgagcgtctcaccgacatccagcgcggcctgtacgaggacacccacggctgggtgcacaccctcgtcccggctgaggaccagccggcggactagtcggccagcagctcggcggcggcccgcaccagcgggagcgccgctagcgcgccggtgccctggccggcgttcatgtccagggcgacgagaggcgtgagttcgagggcctgcagcgcgatgaggtgcgcgggctccggggtcagctgccctgcctggcaccagggggcggtgccgggggagagacgttccgcgaggtaggcggcgacggtgacgggggcgccgtcgagaagcacgggggtgcggcgtgccgcggcctgcgcgatgaaggccaccagtgccaccaggtccggggaggcgatc

SEQ ID NO: 30 - protein, 374 aa, Corynebacterium humireducens
MTSLNFTVNRTSTPTSDEAREEILQNPRFGKNFTDHMVTIEWSEDKGWHDARVRPYEAIPMDPATTVFHYGQAIFEGIKAYRQPDGSIATFRPERNAERMQRSAERMAMPPLPTEDFLETLRLLVDVDRDWVPAAGGEASLYLRPFMISTEVSLGVSPANRYTFFVIASPVGAYFTGGVKPVSVWLSEDYVRAAPGGTGAAKFAGNYAASLLAQAQAEEKGCDQVVWLDAIEHTYIEEMGGMNLFFVYGSGDDVTVATPELSGSLLPGVTRDSLLQVARDLGHRTEERRISKFDWRDDVASGAMTEAMACGTAAVITPVGRVLSNDGEFQINDNQPGEVTMAMRERLTDIQRGLYEDTHGWVHTLVPAEDQPAD

SEQ ID NO: 31 - DNA, 1296 bp, Corynebacterium humireducens
  CDS (301)..(996): gen brnF
cgacatggagacggccccgcagctcaaccgcctggccaaccgcctcgcccacgtcgacctgcgcgccgatcccggtgacatcgccgagctcgtcgagggcatgcgtctgttcgccggttacgccgagtgggcgcccggccagctcgacggggagatcgaccgcggcgactggttcgtcaccccggcgctgcccaccgacgtcatcgtcccgggccgcaccgacctgtggggcgacgtcatgcgccgccagcagccgccgctgccgctcttctcgacgttccccgccgacctcatggacaattgacccccgcgttccctgacgtccgtgccggactgcgggacgcctgggccgtcgcgctcgggctggtccccctggggctggccttcggcctgctgatgacgcaggtgggtttcgcctggtggtggacgccggtcttctcggtgctcatctacgccgggtccatggagttcctggcggtcaacctggtgctcgccggcgtcggccccctgtcgacggcgctgaccgccttcatggtcaacttccggcacatcttctacggcctcaccttcccccggcacctcgtccggggccgggccggccgtgcttactccacgtactcgctgaccgacgagtcctacgccatcgcctccgcccaccctccgcgctccggtacgcaggtgctgacgatccagctcttctgccaggcgatgtgggtggtgcccggcatcatcggggcgctcgtcggtgaggtcatcccggcgggcatccagggcatggagttcgcactcgtcgcactgttcgtggtgctggcgtgggagaccttccggggcagccgggacctctccctgccgctgctcgccggtggcctggcactcgttgccggcctggtgctcccggggcagatgctcatggtggcgctgagcgcctacttcctcgtcctcatcggccggcacctctcccccgccctggaccgtcgcctggagtggagggtctgatgtacgggcttcccgagggggtcaccctcacccagacgttggcggtcctgctgcccatcggggtggtcacggtggcgctgcgctggctgcccttcgcctttgtcagggcgctgcgcgacaaccagttcttcggtctgctcgcccggatgatgccggtgggagtgatgaccgtgctggtggtgtacacgctcctcgggcagcgttcggcgcccggtggcctggcggcggccctcatcggggtcgcggtgaccctggggctgcacgcctggcggcgggactctgggctctcgatcctcggag

SEQ ID NO: 32 - protein, 231 aa, Corynebacterium humireducens
LTPAFPDVRAGLRDAWAVALGLVPLGLAFGLLMTQVGFAWWWTPVFSVLIYAGSMEFLAVNLVLAGVGPLSTALTAFMVNFRHIFYGLTFPRHLVRGRAGRAYSTYSLTDESYAIASAHPPRSGTQVLTIQLFCQAMWVVPGIIGALVGEVIPAGIQGMEFALVALFVVLAWETFRGSRDLSLPLLAGGLALVAGLVLPGQMLMVALSAYFLVLIGRHLSPALDRRLEWRV

SEQ ID NO: 33 - DNA, 1200 bp, Corynebacterium humireducens
  CDS (301)..(900): gene cysE
tggaccgcaaggtcctcgacgacgtcatcaccgtcaccaacgaggacgccatcgagacctcccgtcagctggcggtcaaggacggcatcctgggcggtatctcctccggcggcaacgtctgggccgcgctggagctggcgaagaaggaggagaacgcgggcaagaccatcgtcaccgtcgtcaccgactacggcgagcgttacgtctccaccgtcctgtacgaggacattcgcgactaggaaacggcttaggcccccgcagcgcccaccaggcgacgggcaagcaagtagactctgggccatgctgctgttgaacatcgcgaagatggtccgggaggacctgcgcaacgcccgcgaccacgatcccgccgcccgcggcgacatcgagaacgccgtcgtctactcgggcctgcacgccatctgggcacaccgtgtctcccactggatgtgggagcgcggtctccgcggccccgcgcgaatcctcgcgcagctcaaccggttcttcacgggcatcgagatccaccccggtgccaccatcggccgccgtttcttcatcgaccacggcatgggcatcgtcatcggcgagaccaccgagatcggcgacggcgtcatgctctaccacggcgtcaccctgggtggtcaggtgctcacgcagaccaagcgccacccgaccatcgaggacaacgtcaccatcggtgccggcgccaaggtgctcggcccgatcaccatcggcaagggctccgcgatcggcgccaacgccgtggtgaccaaggacgtcccggcggaccacatcgccacgggcatcccggcgaagaaccgcccgcgccgccagtccgagcgcatcaagctcgtcgatccggactactacacctccaacgatccggtcgactacagcatctagacacaaggaaggccccggtttcccggggcctttttgtgcttcacgacgtcggcgcgtgcccgacgtcacccgacgaggtcgcggtactcctcgttcttgctgatgaagtgctcgaccgcggaacagctcgggcgcacccgcgccccctcctcccgggcccagtcgagggcctcgcggatgagcggggtggacagcgcacgtccgcggtaggcctggtccaccacggtgtggtggaagtccagtaggccaccgtggcggacgtaggaggcgtagccgacctcccggtcgtccacggagatg

SEQ ID NO: 34 - protein, 199 aa, Corynebacterium humireducens
MLLLNIAKMVREDLRNARDHDPAARGDIENAVVYSGLHAIWAHRVSHWMWERGLRGPARILAQLNRFFTGIEIHPGATIGRRFFIDHGMGIVIGETTEIGDGVMLYHGVTLGGQVLTQTKRHPTIEDNVTIGAGAKVLGPITIGKGSAIGANAVVTKDVPADHIATGIPAKNRPRRQSERIKLVDPDYYTSNDPVDYSI

SEQ ID NO: 35 - DNA, 1536 bp, Corynebacterium humireducens
  CDS (301)..(1236): gene cysK
cctccgggtacacccgtacaggtgcacccgatgggcacatgaacgggggtaactttcctttacagatgggcattataacgcgacttcgggggtaaacggaatcgaatccgccgtaacttgcgcattcaagaccgttctgatcggaacaacggcacccactgaaggggtgatatcccgcgccggagaccacccccgcaaccttggagaaaccatgtggtctgccagggacataccatcctgtctactcacatggtgtacgctgacaccaccaacgtcagacgaagcaaggaagcagtcaccatgagcaagatctacgacaacatcctcgacaccatcggaaacaccccgctggtgcgcctcaacggcctcaccgagggcctccaggcggaggtgctcgtgaaggtcgagtccttcaacccggcgaactccgtcaaggaccgcatcggcaaggcgatcatcgacgccgccgaggccgacgggtccctccagccgggcggcaccatcgtggaggccacctccggcaacaccggcatcgccctcgccctcgtgggcgcggcccgcggctacaacgtgatcctcaccatgccggagaccatgtccaacgagcgtcgcgtcatgctccgcgcctacggcgctcagatcgtcctgaccccgggcgcggccggcatgcagggcgccgtcgacaaggcgaacgagatcgtcgccgccgaggacaacgccatcctcgcgaaccagttcgcgcacccggcgaacctgcggatccaccgcgagaccaccgccgaggagatctggaacgacaccgacggcgaggtcgacatcttcgtcgcgggcatcggcacgggcggcaccgtctccggcgtcggccaggtgctcaaggagcgcaagccggaggtccagatctacgccgtcgagccggccgcgtccccgctgctgtccgccggcaaggcgggcccgcacaagatccagggcatcggcgccaacttcatcccggaggtcctggaccgcaaggtcctcgacgacgtcatcaccgtcaccaacgaggacgccatcgagacctcccgtcagctggcggtcaaggacggcatcctgggcggtatctcctccggcggcaacgtctgggccgcgctggagctggcgaagaaggaggagaacgcgggcaagaccatcgtcaccgtcgtcaccgactacggcgagcgttacgtctccaccgtcctgtacgaggacattcgcgactaggaaacggcttaggcccccgcagcgcccaccaggcgacgggcaagcaagtagactctgggccatgctgctgttgaacatcgcgaagatggtccgggaggacctgcgcaacgcccgcgaccacgatcccgccgcccgcggcgacatcgagaacgccgtcgtctactcgggcctgcacgccatctgggcacaccgtgtctcccactggatgtgggagcgcggtctccgcggccccgcgcgaatcctcgcgcagctcaaccggttcttcacgggcatcgagatccaccccggtgccaccatcgg

SEQ ID NO: 36 - protein, 311 aa, Corynebacterium humireducens
MSKIYDNILDTIGNTPLVRLNGLTEGLQAEVLVKVESFNPANSVKDRIGKAIIDAAEADGSLQPGGTIVEATSGNTGIALALVGAARGYNVILTMPETMSNERRVMLRAYGAQIVLTPGAAGMQGAVDKANEIVAAEDNAILANQFAHPANLRIHRETTAEEIWNDTDGEVDIFVAGIGTGGTVSGVGQVLKERKPEVQIYAVEPAASPLLSAGKAGPHKIQGIGANFIPEVLDRKVLDDVITVTNEDAIETSRQLAVKDGILGGISSGGNVWAALELAKKEENAGKTIVTVVTDYGERYVSTVLYEDIRD

SEQ ID NO: 37 - DNA, 999 bp, Corynebacterium humireducens
  CDS (301)..(699): gene gcvH
cagggagccgaccagcgccatcgtcgggctccggggtctggggcgccgcgcggcccgcgagggcgccgaggtctacctcgacggcgaacaggtcggcgtggtcacctccgggcagccggcgccggtgctcggctacccgatcgcactcgcccgcctgcgccccgacgtcaccgcggccggcacggcactggaggtggacatccgtgggaggcggcaccccttcgagatcgtcgacctgcccttctaccgccgcgccgcacgataacctgaacccaccaccaacggaaaggctcccccaccatggccaccgagcactccctgcccgggaactactcctactccgaggaccacgagtggatcgacgcgacgcccgaggacgccgtcggcgcgaccgtgaaggtcggcatcacctccgtggccaccgaacgcctcggcgaggtcgtctacgcggagctcccgcaggtcggtgacgccgtcaccgccggtgaaccgtgcggcgaggtcgagtccacgaagtcggtctccgacctctacgcgccggtcacgggcaccgtcaccgaggtcaacgacgcggtccacgacgactacgccgtgatcaacgacgaccccttcggcgcgggctggctcttcgccgtcgaggtcgacgaggtcggaccgctcatgaccgccgccgagtacgcggaggccaacggcgtgtgaccgcccgggaccggtaccctggtcccatcatgactgcaccccgtgagcccttcttccctgcggaccgttccatccgtgcctccggcgagcccccggagatccgttatctcggcgtcgtcgactaccaggaggcctggaatctgcaggccgagctggcgtcgcaacgcgcggccggggagatcggtgaccagctcctcatcctcgagcacccgagcgtgtacaccgccggcaagcgcacgcagccggaggaccgccccaccaacggcctgccggtcatcgacgtcgaccggggtggccgca

SEQ ID NO: 38 - protein, 132 aa, Corynebacterium humireducens
MATEHSLPGNYSYSEDHEWIDATPEDAVGATVKVGITSVATERLGEVVYAELPQVGDAVTAGEPCGEVESTKSVSDLYAPVTGTVTEVNDAVHDDYAVINDDPFGAGWLFAVEVDEVGPLMTAAEYAEANGV

SEQ ID NO: 39 - DNA, 3462 bp, Corynebacterium humireducens
  CDS (301)..(3162): gene gcvP
ctgggcaccgcggccatcgagaagcgtccggtcgtggtgaccgatgacggcgtcgactcgatcgccatccgccagatgtgctacctgccgttcacctacgaccaccaggtcatcgacggtgccgacgccggtcgcttcatcaccaccatcaaggaccgcctggagaccgcggacttccagtccgacctcggcctctaagctctcccgctgagagagaccgccacctgaccttcccggtcgggtggcggttttcttcttataatcggaatcatccggtcccccatcgaggagcgattccgcatggccctgcacccgatcaccgattccgcctcctacctggcccgacacctcggccccgacaccgcggaggagcaggtcatgctgggggcgctgggctacggttccctcgccgagcttgtcgacgccgccctgcccaccgacatccgcctcaccgaacctctcccgcggcacgcgcccctctcggagacggaggcgcaggcgcgactgcgggagtacgcctcgcggaacacggtgctccgttccttttacgggcagggtttctccgacacggtcactcccccggtgatccgccgcggggtgctcgaggccccgggctggtacaccgcgtacacgccgtaccagccggagatctcgcagggccgcctcgaggcgctgctcaacttccagacgatggtctccgagctcaccggcctgccggtggcgaacgcctcgctcctcgacgaggcttccgccaccgccgaagccgtcggcctcatgtcgcgggcgcagaggaaggggcggcgggtgcttctcgacgcccgcctccacccccaggtcctcgccgtcgctgcggagcgggcccgggcgatcgacctggaggtcgccgtcgaggacctgtccggcccgctggtgggtgaggatctctgcggcgtcgtcatcgcctaccccggcacggagggcgacatcgccgatccccgcccggtcatcgaggccgtgcacgcacgcgggggtctggccaccgtggtcaccgatcccctgtcgctgctcctgctcgagtcgccgggtgagatgggggcggacatcgcggtgggctcctcgcagcgtttcggcgtgcccctgttctacggtggcccgcacgccgcgtacatggccgtcagtgacgccctcaagcgccagatccccggccgcctggtgggcgtgtccgtcgacgccgagggcgcccccgcctaccggctcgcgctgcagacccgggagcagcacatccgtcgcgagcgggcgacgtcgaacatctgcaccgcgcaggcgctgctggcggtcaccgccggcatgtacgccgtctaccacggtcccgaggggttgcgtgccatcgcggagcgcgtgcacggtctggcctgtgacttcgcggcggccgtccgcgccgccggcgggacggtgctgcacgacgccttcttcgacaccgtcgcggtgcgggtggaggctgcacgaccgatcgtcggcacgctcgcggaggcgggctacctcgtgcgtgccgtggacggcacgaccgtcggcgtgagcttcggtgagtcggcggaggagggggacgtcgagaagctcgccgccgtcttcggcgcctccctgacggcgggcacccgctgcatccccgcgtccgtggcgcggcagacgccgacgctgacgcacccggtcttctccacgctccactccgagacgcagatgatgcgctacctgcgcacgctctcggaccgggatctcgcgctcgaccgcacgatgatcccgctgggttcgtgcacgatgaagctcaacccgaccgccgggctggagacgatcacgtggccggagttcgccgacatgcaccccttcgcccccgacgaccaggccgcgggctggctggcgctcatcgcggagctggagggctggctcgcggagctcaccggatacgcgaaggtgtccgtgcagcccaacgcgggttcccagggggagctggccggactgctggccatccgccgctaccacgtggccaacggggacatggaccgtgatatctgcctggtcccggcctcggcgcacggcacgaacgcggcgtcggcgacgctggcgcacctgcgggtcgtggtggtcggcaccgccggggacggctccatcgacatggacgacctcgacgcgaaactcgccgagcacggcccgcaggtggccgcgatcatgatcacctacccctccacgcacggcgtcttcgaggacaccgtgcgcgaggtgtgcgacagggtgcacgcggtcggcgggcaggtctacatcgacggcgcgaacctcaacgccctgaccggcctggcgctgctgggccgcatcggcggcgacgtctcccacctcaacctgcacaagacgttcaccatcccgcacggcggcggtggcccgggcgtgggcccggtgtgcgtcgcggagcacctcgtccccttcctgccggcggacccgacctccctcgacggcgccaccccggcggcggtcggcaccggcgtgcccgtctctgcgacgcgccacggctcggcgggcgtcctgcagatctcctgggcgtacatcgccatgatgggcaccgacggcctcacccgcgccagcgccgcggcgatcctcagcgcgaactacgtcgcccaccgcctgggcgaggccttcccggtgctctacaccggccgcaacggcctggtggcgcacgagtgcatcctcgacctgcgcgacctgacgaggcagaccggcgtcaccgccacggacgtggccaaacgcctcatcgacttcggcttccacgcccccacgctctccttccccgtcgccggtaccctcatggtcgagccgaccgagtccgaggacctcgccgagctcgaccgcttcatcgaggcgatgctcaccatccgcgcggagatcgacgagatcagcggcggcgacatcgcctacgaggactccgtcctccaccacgcgccgttcaccgcgtggagcgtgtcccgcgacgactgggaccacgccttcacccgtgagcaggcggcctggccggtccccggtctgcgccgcaccaagtacttcccgccggtccgccgcctcaacgaggcctacggtgaccgccacctcgtgtgcgcctgcccgccgcccgaggccttcgacctttccgaggagaaccagtgaccgacctgcgtaccagccccctccacgagcgtcatgtggagctcggggcctccttcacccccttcggcccgtggaacatgcccctgcgctacggcaacgagctcgacgagcaccgcgccgtccgttccaccgccgggctcttcgacctctcgcacatgggtgagatccgcgtgtggggcgcacaggccgcggagttcctcgaccatgcgctgctctccgccttctccacgctccccgtgggtaaggcgcggtactccatgcttgtcgacgccaccggtgccatcctcgacgacctcctca

SEQ ID NO: 40 - protein, 953 aa, Corynebacterium humireducens
MALHPITDSASYLARHLGPDTAEEQVMLGALGYGSLAELVDAALPTDIRLTEPLPRHAPLSETEAQARLREYASRNTVLRSFYGQGFSDTVTPPVIRRGVLEAPGWYTAYTPYQPEISQGRLEALLNFQTMVSELTGLPVANASLLDEASATAEAVGLMSRAQRKGRRVLLDARLHPQVLAVAAERARAIDLEVAVEDLSGPLVGEDLCGVVIAYPGTEGDIADPRPVIEAVHARGGLATVVTDPLSLLLLESPGEMGADIAVGSSQRFGVPLFYGGPHAAYMAVSDALKRQIPGRLVGVSVDAEGAPAYRLALQTREQHIRRERATSNICTAQALLAVTAGMYAVYHGPEGLRAIAERVHGLACDFAAAVRAAGGTVLHDAFFDTVAVRVEAARPIVGTLAEAGYLVRAVDGTTVGVSFGESAEEGDVEKLAAVFGASLTAGTRCIPASVARQTPTLTHPVFSTLHSETQMMRYLRTLSDRDLALDRTMIPLGSCTMKLNPTAGLETITWPEFADMHPFAPDDQAAGWLALIAELEGWLAELTGYAKVSVQPNAGSQGELAGLLAIRRYHVANGDMDRDICLVPASAHGTNAASATLAHLRVVVVGTAGDGSIDMDDLDAKLAEHGPQVAAIMITYPSTHGVFEDTVREVCDRVHAVGGQVYIDGANLNALTGLALLGRIGGDVSHLNLHKTFTIPHGGGGPGVGPVCVAEHLVPFLPADPTSLDGATPAAVGTGVPVSATRHGSAGVLQISWAYIAMMGTDGLTRASAAAILSANYVAHRLGEAFPVLYTGRNGLVAHECILDLRDLTRQTGVTATDVAKRLIDFGFHAPTLSFPVAGTLMVEPTESEDLAELDRFIEAMLTIRAEIDEISGGDIAYEDSVLHHAPFTAWSVSRDDWDHAFTREQAAWPVPGLRRTKYFPPVRRLNEAYGDRHLVCACPPPEAFDLSEENQ

SEQ ID NO: 41 - DNA, 1704 bp, Corynebacterium humireducens
  CDS (301)..(1404): gene gcvT
cgagctcgaccgcttcatcgaggcgatgctcaccatccgcgcggagatcgacgagatcagcggcggcgacatcgcctacgaggactccgtcctccaccacgcgccgttcaccgcgtggagcgtgtcccgcgacgactgggaccacgccttcacccgtgagcaggcggcctggccggtccccggtctgcgccgcaccaagtacttcccgccggtccgccgcctcaacgaggcctacggtgaccgccacctcgtgtgcgcctgcccgccgcccgaggccttcgacctttccgaggagaaccagtgaccgacctgcgtaccagccccctccacgagcgtcatgtggagctcggggcctccttcacccccttcggcccgtggaacatgcccctgcgctacggcaacgagctcgacgagcaccgcgccgtccgttccaccgccgggctcttcgacctctcgcacatgggtgagatccgcgtgtggggcgcacaggccgcggagttcctcgaccatgcgctgctctccgccttctccacgctccccgtgggtaaggcgcggtactccatgcttgtcgacgccaccggtgccatcctcgacgacctcctcacctaccgcctcgccggggacgagttcctggtggtccccaacgcggcgaacacggagaccgtgtgggaggagttccgggcccgcgccgccggcttcgacgtggagctggccgacgagtccgccgacactgcgctgctggctgtgcagggcccccgcgccgagcagatcatcgccgacctcgtcgccggggacgacgagtcggtcgtgcgcacgatgaagttctactcggcggccccgttgacggtggcgggcgtcgatacgctgctcgcccgcaccggctacaccggggaggacggcttcgagctctacgtctccggcgcggacgccgctgaactgtgggacgcgctgctcaacgccggcgccgcctacgacatgctgcccgccggactggcggcgcgggactccctgcgcctggaggccgggctccccctctacgggcaggagctcacccgcgacatcacgccggtggaggccgggatggcccgcgccttcgcctcgaaggagggggacttcgtcggccgcgacgccctcgtcggcagggagccgaccagcgccatcgtcgggctccggggtctggggcgccgcgcggcccgcgagggcgccgaggtctacctcgacggcgaacaggtcggcgtggtcacctccgggcagccggcgccggtgctcggctacccgatcgcactcgcccgcctgcgccccgacgtcaccgcggccggcacggcactggaggtggacatccgtgggaggcggcaccccttcgagatcgtcgacctgcccttctaccgccgcgccgcacgataacctgaacccaccaccaacggaaaggctcccccaccatggccaccgagcactccctgcccgggaactactcctactccgaggaccacgagtggatcgacgcgacgcccgaggacgccgtcggcgcgaccgtgaaggtcggcatcacctccgtggccaccgaacgcctcggcgaggtcgtctacgcggagctcccgcaggtcggtgacgccgtcaccgccggtgaaccgtgcggcgaggtcgagtccacgaagtcggtctccgacctctacgcgccggtcacgggcaccgtcaccgaggtca

SEQ ID NO: 42 - protein, 367 aa, Corynebacterium humireducens
VTDLRTSPLHERHVELGASFTPFGPWNMPLRYGNELDEHRAVRSTAGLFDLSHMGEIRVWGAQAAEFLDHALLSAFSTLPVGKARYSMLVDATGAILDDLLTYRLAGDEFLVVPNAANTETVWEEFRARAAGFDVELADESADTALLAVQGPRAEQIIADLVAGDDESVVRTMKFYSAAPLTVAGVDTLLARTGYTGEDGFELYVSGADAAELWDALLNAGAAYDMLPAGLAARDSLRLEAGLPLYGQELTRDITPVEAGMARAFASKEGDFVGRDALVGREPTSAIVGLRGLGRRAAREGAEVYLDGEQVGVVTSGQPAPVLGYPIALARLRPDVTAAGTALEVDIRGRRHPFEIVDLPFYRRAAR

SEQ ID NO: 43 - DNA, 1899 bp, Corynebacterium humireducens
  CDS (301)..(1599): gene glyA
gacagggggagatagacctcggcgacctccacgaggtcgatcgattcgccgatgccgcggagctgctcgacctcctcctccgtgagcacctgcggcatcgattgacgcagggcacgccaggaggagcggtcgaaatccacgtagggggtggcgtccttgggccgagacatgcgtcccattgtgtcatctgccccgtcaactgtgtcccactcacccggggtgcgggggtatgaggtgccctgtgggcggtatgctgtccacgaatgccgtgtacccctagaaaggctggctgtaacgcccatgaccgctgagtcttctgatctccgttaccaggaactgtccgtcctcgacccggaggtccacgccgccatcggcggtgagatcgcccgtcagcgtgacttcctcgagatgatcgcgtccgagaacttcgtcccccgtgccgtcctgcaggcacagggttcggtgttcaccaacaagtacgccgagggctacccggggcgtcgttactacggtggctgcgagaacgccgacatcgtcgaggacctggcccgcgaccgcgccaaggccctgttcggcgccgagttcgccaacgtccagccgcactccggcgcccaggccaacgccgccgtcctgcacgcgctggccgacgccggcgacaagatcatgggtctgtccctggcccacggtggtcacctgacccacggcatgaagctcaacttctccggcaagctctacgacgtcgtcgcctacgaggtcgacccggagacccaccgcatcgacatggaccgcgtccgcgagcaggccctggccgagcgcccgaaggtcctcatcgccggctggtccgcgtacccgcgcaccctcgacttcgaggcgttccgctccatcgccgacgaggtcggcgcgtacctgtggaccgacatggcgcacttcgccggcctcgtcgccgccgacctgcacccgtccccggtcccgcactccgacgtcgtctccaccaccgtccacaagacgctgggtggcccgcgttccggcctgatcgtcgcgaagcaggagtgggccaagaagctcaactccgccgtcttcccgggccagcagggtggtccgctcatgcacgccatcgccgccaaggccgtggcactgaaggtcgccggcaccgacgagttcaaggaccgtcaggcccgcaccatcgagggtgccaagatcctggccgagcgtctcaccgccgctgacgcgaaggccgccggcatcgacgtcctcaccggtggcaccgacgtgcacctggtcctcgctgacctgcgcaactccgagatggacggccagcaggccgaagacctcctccacgaggtcggcatcaccgtcaaccgcaacgccgtcccgaacgacccgcgcccgccgatggtcacctccggcctgcgcatcggcaccccggccctggccacccgtggtttcgacgccgccgccttcaccgaggtcgccgacatcatcggcaccgccctggtcaacggcaagaacgccgacatcgaggcactgcgtgcccgcgtcgcgaagctgaccgaccagtacccgctgtacgagggtctggaggagtggaagatcaactaggtcttcccgccctccccgtgcgcgtcctcgtcatagacaacctcgattccttcacctggaatctcgtcgcctacgtcgaggacgtcaccggtgtcgcccccgaggtgatcaccaacaacgaacccggatgggatgtcgaccgcgtcgccacctacgacgccgtcatcatctccccgggccccggccgcccggagcgtgagaaggacatcggcatgtgcctcgatgtcctgcgcgacgggcgtgtcccgattctgggggtctgcctcgggcaccaggccctcgcccacgcgtggggcggca

SEQ ID NO: 44 - protein, 432 aa, Corynebacterium humireducens
MTAESSDLRYQELSVLDPEVHAAIGGEIARQRDFLEMIASENFVPRAVLQAQGSVFTNKYAEGYPGRRYYGGCENADIVEDLARDRAKALFGAEFANVQPHSGAQANAAVLHALADAGDKIMGLSLAHGGHLTHGMKLNFSGKLYDVVAYEVDPETHRIDMDRVREQALAERPKVLIAGWSAYPRTLDFEAFRSIADEVGAYLWTDMAHFAGLVAADLHPSPVPHSDVVSTTVHKTLGGPRSGLIVAKQEWAKKLNSAVFPGQQGGPLMHAIAAKAVALKVAGTDEFKDRQARTIEGAKILAERLTAADAKAAGIDVLTGGTDVHLVLADLRNSEMDGQQAEDLLHEVGITVNRNAVPNDPRPPMVTSGLRIGTPALATRGFDAAAFTEVADIIGTALVNGKNADIEALRARVAKLTDQYPLYEGLEEWKIN

SEQ ID NO: 45 - DNA, 1932 bp, Corynebacterium humireducens
  CDS (301)..(1632): gene hom
gcggcgtgcgcggacgagatccccgccagtgggatcaccaggcacgccacgcaggccgtgagtgcacgggtgatccgacggcgggacatgctgactcctgtcactggcagaggcatgggggtggtgaggacagattaatcgtctgaacgcaatatgtccagagatgtgacttatcttatggagtgtcgtgaccccggagtctgaggaagtggccgaatcccggtagggtggtcacggaaatctgtcctcagtctgcccgtccccgacgggcacggacccacgaccatgtgcaggagaaccatgaccgtcactcagcagcccagcttcaaccccggcaagggagccggcgagccggtgggcgtcgccattctcggccacggcaccgtcggatctgaggtgctgcgcctgatgggcgagtactccgacgcgctcgcgcaccgcatcggcggtccgctcgagctcaagggtgtggccgtgtccgacctctccaagccgcgcgagggcgtggaccgtgagctgctcaccgatgacgcgctgagcctcatcaaccgcgacgacgtcgacatcgtcgtcgaggtcatcggcggcatcgagtacccgcgtgagctggtcctggccgccctgcgcgccggcaagtccgtcgtcaccgccaacaaggccctcgtcgccgcgcacgccgacgagcttgccgacgccgccgacgccgccaacgtcgacctctacttcgaggccgccgtcgccgccgccatcccggtcgtcggcatgctgcgtcgttccctcgccggcgacaacatcctgcgtatctccggcatcgtcaacggcaccaccaacttcatcctcgacgcgatggagtccaccggcgccagctacgacgacgcgctcgccgaggccacccgtctgggctacgccgaggccgacccgaccgccgacgtcgagggccacgacgccgcctccaaggccgccatcctcgcctccctgggcttccacacccgcgtcaagttcgacgacgtcagctgcgagggcatctccaaggtcaccgccgaggacatcgaggccgcccgcgacgccggctacgtgatcaagctgctcgccatctgtgagcgcgtcaccgacaaggacggcgtggagtccgtcgccagccgcgtccacccgaccctcgttccggtcgaccacccgctggcctcggtcaaccagtcctacaacgccatcttcgtcgaggccgaggcagccggtcgcctgatgttctacggcaacggtgccggtggcgccccgaccgcctccgccgtcctcggtgacctcgtcggcgccgcccgcaacaaggtccacggtggccgcgccccgggcgagaacacctacgcgaacctgccgatcgccgacctcggcgacgtgcgcacccgctaccacatcgacatggaggtcgaggaccgcaccggtgtcctcgccgagctgtccgcgatcttcgccacccacgacatctccctcaagaccgtccgccaggaggaggccggcgaccacgcccgcctcatcgtcgtcacgcattccgcacgtgaggccgacctggccgccaccgtcgaggacctgaagaaggccccggcggtcaagtccgtcgacagcgtcctgcgactcatctagggagcgttgagctgtgagcatccagcttgaggtgggcacccgggccaccgtcaccgtccccggctcctccgcgaacctgggccccggattcgacaccctcggcctggccgtgggcatctacgacaccgtcgaggtcgaggtcatcgagtcgggcctcgaggtcgaggtcttcggcgagggcgaggacgacctgccccgcgacggttcccacctggtggtcaaggccatccggtcgggcctcaacgccgcccacgccgaggccccgggcctgcgcgtggtgtgcaccaacgccatcccgca

SEQ ID NO: 46 - protein, 443 aa, Corynebacterium humireducens
MTVTQQPSFNPGKGAGEPVGVAILGHGTVGSEVLRLMGEYSDALAHRIGGPLELKGVAVSDLSKPREGVDRELLTDDALSLINRDDVDIVVEVIGGIEYPRELVLAALRAGKSVVTANKALVAAHADELADAADAANVDLYFEAAVAAAIPVVGMLRRSLAGDNILRISGIVNGTTNFILDAMESTGASYDDALAEATRLGYAEADPTADVEGHDAASKAAILASLGFHTRVKFDDVSCEGISKVTAEDIEAARDAGYVIKLLAICERVTDKDGVESVASRVHPTLVPVDHPLASVNQSYNAIFVEAEAAGRLMFYGNGAGGAPTASAVLGDLVGAARNKVHGGRAPGENTYANLPIADLGDVRTRYHIDMEVEDRTGVLAELSAIFATHDISLKTVRQEEAGDHARLIVVTHSAREADLAATVEDLKKAPAVKSVDSVLRLI

SEQ ID NO: 47 - DNA, 1644 bp, Corynebacterium humireducens
  CDS (301)..(1344): gene lipA
gcggggtgaccatgcacgggctgagcctgaactgctcgaacacgctcgagcactacgggcacatcgtggcgtgcggcatcgacgacgccgacgtcaccaccctcagcatggaactggggcgcgacgtcagcgtcggggaggtcacggcaccgcttgtcgacgccctcctggccgccctcgccggtgaactcgccgtcgcggaccacaccttcggatcggcgcccgatccgacgaagattcccgcgaaaacgcgctgacctctaagtttatccctatcagtagaaagagtatggtggcgttgtgactatcgcacctgaaggacgcaagctgctccgggtggagaagcgcaatgcgcagacccccatcgagacgaagccccgttggatccgcaacgcggtgaagaccggccccgagtacgaggacatgaagaagaaggtggcgggcgcctccctgcacaccgtctgtcaggaggcgggctgccccaacatccacgagtgctgggagtcccgcgaggcgacgtttctcatcggcggcgccaactgctcccgccgctgcgacttctgccagatcaactccgcgaagccggagccgctggaccgcgacgagccgcgccgcgtggccgagtccgtccgcgagatgggcctgaactactccaccatcaccggcgtgacccgcgacgacctcgaggacgagggtgcctggctctacgcggaggtcgtccgccagatccacgagctcaacccgaacaccggcgtcgagaacctcgtgcccgacttctccggccgttccgagctgctggagcaggtcttcgagtcccgccccgaggtgttcgcccacaacctggagaccgtgccgcgcatcttcaagcgcatccgcccggccttccgctacgagcgttccctcgacgtgatccgccaggcccacgactacgggctgatcaccaagtcgaacctcatcctcggcatgggcgagaccctcgacgagatccgtgaggccctcaccgacctgcacagcgccggctgcgacatcatcaccatcacgcagtacctgcgccccggcccgatgtaccacccgatcgaccgctgggtgaagccggaggagttcgtcgagcacaaggacttcgccgaggagctcggcttcggtgccgtcatgtccggcccgctggtccgttcctcctaccgtgcgggacgtctctactcgcaggcgatggccgcccgcggccgggagatccccgaccacctcaagcacctggccgagacctcgcagggcagcaccgaccaggaggccaccaccctcctggccaagtacggcccctcccaggacacaccggtcacctcacgttaggcacccaccggaccctgacctaaagtagaggccatggcagacgacaagcagaaggcggcagcaaaggccgcgaaggcagaggcacgggccgccaagcgggcgaagagcaaggagacgcgcgcccagctctggcaggcgttcaacatccagcgcaagcaggacaagatgctcgtcccgctgatggtgctctccgtcgtgggtgtggccgcgctcctcttcctcatcggcctggcctggggcggccagtggttcacgctcatcctgggtatcttcctgggtgccgtcctggcgatgtacatc

SEQ ID NO: 48 - protein, 347 aa, Corynebacterium humireducens
VTIAPEGRKLLRVEKRNAQTPIETKPRWIRNAVKTGPEYEDMKKKVAGASLHTVCQEAGCPNIHECWESREATFLIGGANCSRRCDFCQINSAKPEPLDRDEPRRVAESVREMGLNYSTITGVTRDDLEDEGAWLYAEVVRQIHELNPNTGVENLVPDFSGRSELLEQVFESRPEVFAHNLETVPRIFKRIRPAFRYERSLDVIRQAHDYGLITKSNLILGMGETLDEIREALTDLHSAGCDIITITQYLRPGPMYHPIDRWVKPEEFVEHKDFAEELGFGAVMSGPLVRSSYRAGRLYSQAMAARGREIPDHLKHLAETSQGSTDQEATTLLAKYGPSQDTPVTSR

SEQ ID NO: 49 - DNA, 1389 bp, Corynebacterium humireducens
  CDS (301)..(1089): gene lipB
gaaggtcggcatcacctccgtggccaccgaacgcctcggcgaggtcgtctacgcggagctcccgcaggtcggtgacgccgtcaccgccggtgaaccgtgcggcgaggtcgagtccacgaagtcggtctccgacctctacgcgccggtcacgggcaccgtcaccgaggtcaacgacgcggtccacgacgactacgccgtgatcaacgacgaccccttcggcgcgggctggctcttcgccgtcgaggtcgacgaggtcggaccgctcatgaccgccgccgagtacgcggaggccaacggcgtgtgaccgcccgggaccggtaccctggtcccatcatgactgcaccccgtgagcccttcttccctgcggaccgttccatccgtgcctccggcgagcccccggagatccgttatctcggcgtcgtcgactaccaggaggcctggaatctgcaggccgagctggcgtcgcaacgcgcggccggggagatcggtgaccagctcctcatcctcgagcacccgagcgtgtacaccgccggcaagcgcacgcagccggaggaccgccccaccaacggcctgccggtcatcgacgtcgaccggggtggccgcatcacctggcacggcgagggacagctggtggtctacccgatcatcaaactggccgacccggtggacgtcgtggactatgtccgccgcctcgaggaggcggtgatcgcgacggtgcgggaggtgggcgtcggcaatgcgggtcgcatcgacggccgctccggagtctgggtccccgccgacgggacccgacgcgaccggaaggtggcggcgctcggcatccgtgtcacccgcggggtgaccatgcacgggctgagcctgaactgctcgaacacgctcgagcactacgggcacatcgtggcgtgcggcatcgacgacgccgacgtcaccaccctcagcatggaactggggcgcgacgtcagcgtcggggaggtcacggcaccgcttgtcgacgccctcctggccgccctcgccggtgaactcgccgtcgcggaccacaccttcggatcggcgcccgatccgacgaagattcccgcgaaaacgcgctgacctctaagtttatccctatcagtagaaagagtatggtggcgttgtgactatcgcacctgaaggacgcaagctgctccgggtggagaagcgcaatgcgcagacccccatcgagacgaagccccgttggatccgcaacgcggtgaagaccggccccgagtacgaggacatgaagaagaaggtggcgggcgcctccctgcacaccgtctgtcaggaggcgggctgccccaacatccacgagtgctgggagtcccgcgaggcgacgtttctcatcggcggcgccaactgctcccgccgctgcga

SEQ ID NO: 50 - protein, 262 aa, Corynebacterium humireducens
VTARDRYPGPIMTAPREPFFPADRSIRASGEPPEIRYLGVVDYQEAWNLQAELASQRAAGEIGDQLLILEHPSVYTAGKRTQPEDRPTNGLPVIDVDRGGRITWHGEGQLVVYPIIKLADPVDVVDYVRRLEEAVIATVREVGVGNAGRIDGRSGVWVPADGTRRDRKVAALGIRVTRGVTMHGLSLNCSNTLEHYGHIVACGIDDADVTTLSMELGRDVSVGEVTAPLVDALLAALAGELAVADHTFGSAPDPTKIPAKTR

SEQ ID NO: 51 - DNA, 2010 bp, Corynebacterium humireducens
  CDS (301)..(1710): gene lpd
caactgacatcacagagagaaggcacacatgtccatcttcgagcagatcatcgtcgccatcaacaacttcgtcggcccgggcatccacgccctgtcctccgcttcctccaacgccgcactggccatcggcctcttctaggtcgaccccggaagcatctgcttatcgacgccccggcccccggtcggggcgttcgtcgttgcggcaccacagtcccgccaccgtcccaccgcccccacgggggcgggatccttttgtggggggcggtgacacgggggaaacggtcacctatccttggtggcgtgactgaacattatgacgttgttgtactcggtgcgggccccggtggctacgtcgccgccatccgcgcagcccagctcggcaagaaggttgctgtcgtcgagaagcagtactggggcggagtctgcctcaacgtgggctgcatcccctcgaaggcgctgatcaagaacgccgagatcgcccacatcttcacgcacgagaagaagacgttcggcatcaacggcgacgtctccttcaactacgaggacgcccacaagcgctcccgtcaggtgtcggagaagatcgtcggcggcgtccactacctgatgaagaagaacaagatcaccgagatcgacggcttcggaaccttcagggacgccaagaccatcgaggtcagcgagggcaaggacgccggcaaggtcgtcaccttcgacgactgcatcatcgccaccggctccgtggtcaacagcctccgtggcgtcgagttctccgagaacgtcgtctcctacgaggagcagatcctcaacccggtcgccccggagaagatggtcatcgtcggtgccggcgccatcggcatggagttcgcctacgtgctctccaactacggcgtcgacgtcaccgtcatcgagtacatggaccgtgtcctgccgaacgaggacgaggacgtctccaaggtcatcgccaaggcctacaagaagatgggcgtcacgctcctcccgggccacgccaccaccgccgtgcgcgacaacggcgactccgtcgaggtcgactaccagaagaagggctcggacaagaccgagaccatcgtcgccgaccgcgtcctcgtctccgtcggcttccgcccgcgtgtcgagggcttcggcctggagaacaccggcgtcgagctcaccgagcgcggtgccatcgccatcgacgacttcatgcgcaccaacgtcgagcacatctacgccatcggtgacgtcaccgccaagctgcagctggcccacgtcgccgaggcgcagggcatcgtcgccgccgagaccatcgccggcgccgagacccacgagctgggcgactacatgatgatgccgcgcgccaccttctgtaacccgcaggtcgcgtccttcggctacaccgaggcgcaggccaaggagaagtggccggaccgcgagatcaaggtcgcgtccttcccgttctccgcgaacggcaaggccgtcggcctggccgagaccgagggcttcgccaagatcgtcgccgacgccgagtacggcgagctgctgggcggccacctggtcggcgccaacgcgtccgagctgctcaacgagctggtcctcgcgcagaactacgatctcaccaccgaggagatcagccgcgcggtccacatccacccgaccctgtcggaggccgtcaaggaggccgcacacggcatcgacggccacatgatcaacttctagtcccccggaaaaaggggcctcccggctgggaggccccttttctcatgctttccgacgcccccggggcgtcgccaagcgcctagttgtagggcgcgaccgacgaccggtgggcgtcgatggtgatctcctcgtggatcggcgggaacgcgcgctgcgcgcagttctcccgcgggcacacgcggcagccggcgccgatcggggtggcgctggacaggtcggcgaggttgagtccctgcgcgtagaccgtgcggtcggcgtggcgggcctcgcagcccaggccgatggcgaagagcttgccgg

SEQ ID NO: 52 - protein, 469 aa, Corynebacterium humireducens
VTEHYDVVVLGAGPGGYVAAIRAAQLGKKVAVVEKQYWGGVCLNVGCIPSKALIKNAEIAHIFTHEKKTFGINGDVSFNYEDAHKRSRQVSEKIVGGVHYLMKKNKITEIDGFGTFRDAKTIEVSEGKDAGKVVTFDDCIIATGSVVNSLRGVEFSENVVSYEEQILNPVAPEKMVIVGAGAIGMEFAYVLSNYGVDVTVIEYMDRVLPNEDEDVSKVIAKAYKKMGVTLLPGHATTAVRDNGDSVEVDYQKKGSDKTETIVADRVLVSVGFRPRVEGFGLENTGVELTERGAIAIDDFMRTNVEHIYAIGDVTAKLQLAHVAEAQGIVAAETIAGAETHELGDYMMMPRATFCNPQVASFGYTEAQAKEKWPDREIKVASFPFSANGKAVGLAETEGFAKIVADAEYGELLGGHLVGANASELLNELVLAQNYDLTTEEISRAVHIHPTLSEAVKEAAHGIDGHMINF

SEQ ID NO: 53 - DNA, 1866 bp, Corynebacterium humireducens
  CDS (301)..(1566): gene lysC
gccggtgcccgcccaccacaggggacggctgatcgcgttccagaagggggaacccttgagggagccgtcggcgggggcctcctccgcgatgcggtggcgcaccacggttccccacgcgatggtgagggcggaggccagtgcgaacagcacggccagcagattgctgtgcacctcatccaccttagtgaacgggggcctttccgcagggccgggacccgcccactcgactactcggacgaccccggctccgggtacgatgaagcagaactttggcaccccagacgaaaggcggcctacacggtggctctgatcgttcagaaatatggaggctcctccctggagaccgcggagcggatccgcgctgtcgccgaacggatcgtcgccacgaaaaaggccggcaacgacgtcgtcgtggtctgctccgcgatgggcgacaccacggacgaactcctggacctcgccgcccaggtgaacccggttccgccggcccgtgagatggacatgctgctcaccgcgggtgagcgcatctccaacgcgctggtcgcgatggcgatctcctcgctcggcgcgaaggcgcagtccttcaccggctcgcaggccggtgtgctcaccaccgagcgtcacggcaacgcccgcatcgtcgacgtcaccccggaccgcgtccgcgaggcgctggacgagggcaacatctgcatcgtcgccggtttccagggcatcaacaaggacacccgcgacgtcaccaccctgggtcgtggcggttccgacaccacagcggtggccctggcggcggcgctcaacgccgacgtgtgcgagatctactccgacgtcgacggcgtctacaccgccgatccgcgcatcgtcccgaacgcgcagaagctcgagaagctctccttcgaggagatgctcgagctggcggccgtcggttcgaagatcctggtgctgcgtgccgtcgagtacgcacgtgccttcaatgttcccctgcgagttcgctcgtcttacagcaatgacaccggcaccctgatcgccggttcgatggaggatatccccgtggaagaagcagttctcactggcgttgccaccgacaagtccgaggccaaggtcaccatcctgggtattcccgacaagccgggcgaggcggccaccgtcttccgcgccgtcgcggacgcggagatcaacatcgacatggtcctgcagaacgtctcctccctggaggacggcacgaccgacatcaccttcacctgcccgcgtgccgacggcccccgcgccatcgagctgctcaagaagatgcaggcgaagagcggctggtccaacgtgctctacgacgaccaggtgggcaaggtctccctcgtgggtgccggcatgaagtcccacccgggcgtcaccgccgacttcgccgaggcgctccgcgacgccggcgtgaacatcgagctaatctccacctcggagatccgcatctcggtgctcacccgcgaggccgacctggacgccgccgcccgtgccctgcacgagaagttcgagctcggcggcgacgccgaggccaccgtctacgccggcaccggccgctagacaatcccttccacagaggagctttcactctcatgaccaccattgctgtcgtcggtgccaccggccaggtcggccgcgtgatgcgctcgatcctggaggagcgcaacttcccggccgacaaggtccgtttcttcgcgtccccgcgctccgcgggcaccgtcatcgagttccgcggtgaggacatcaccgtcgaggacctcacccagatcaccccggagtccgtcaaggacgtcgacatcgccctcttctccgccggtggttccacctcccgtgagtgggccccggtcttcgccgaggccg

SEQ ID NO: 54 - protein, 421 aa, Corynebacterium humireducens
VALIVQKYGGSSLETAERIRAVAERIVATKKAGNDVVVVCSAMGDTTDELLDLAAQVNPVPPAREMDMLLTAGERISNALVAMAISSLGAKAQSFTGSQAGVLTTERHGNARIVDVTPDRVREALDEGNICIVAGFQGINKDTRDVTTLGRGGSDTTAVALAAALNADVCEIYSDVDGVYTADPRIVPNAQKLEKLSFEEMLELAAVGSKILVLRAVEYARAFNVPLRVRSSYSNDTGTLIAGSMEDIPVEEAVLTGVATDKSEAKVTILGIPDKPGEAATVFRAVADAEINIDMVLQNVSSLEDGTTDITFTCPRADGPRAIELLKKMQAKSGWSNVLYDDQVGKVSLVGAGMKSHPGVTADFAEALRDAGVNIELISTSEIRISVLTREADLDAAARALHEKFELGGDAEATVYAGTGR

SEQ ID NO: 55 - DNA, 1794 bp, Corynebacterium humireducens
  CDS (301)..(1494): gene metB
acctccccggacgggagagactgctcggtgtgatcgaccggctccgcgcggcgcagcccggcctgacgacggtgctggtgacgcatcacgtggaggagatcgcggcgtcgacaagcgatgtcctgctgctcaaggagggccgcgtcctggcctccggacccgtcgacgagacgctgacctcggggaacctgtcggcactctacgacctgccggtgtcgttggagaaggtccacggacgctggttcgcgctctgcatataattcccggatgctgccgggaaagtgaaccgcttggtctatagtggccgacatgacccacggactttctggtttctcgtctcgttccatccatgccggatacgagcctgacagcctctacggcccgatcaacacgccgatctacgcgtcgaccaccttcgcgcaggacggcctcaacgagctgcgcggtggcttcgagtacacccgctgcggcaaccccacgatcgacgccctcgaaaagaccgtcgcagccctggaaggcgcacagtacggccgcgcgttctcctccggcatggccgccaccgacgtcatcctgcgtatcctcctgcgccccggtgaccacctcatcctcggccacgacgcctacggcggcacctggcgcctcatcgaccaggccttcggccagtggggcgtcgagtacaccgtcgtcgacaccaccgacgttgccgccgtcgaggccgccctccgcccgaacaccaagctcatctggctggagaccccgaccaacccggccctgtccatcaccgacatcgccgccatcgccgcgatcaagcagcaggccgccctcgtcgtggacaacaccttcgcgtccccgtacctgcagcagccgctcgccctcggcgcggaccacgtcctgcactccgccaccaagtacctcggcggtcactccgacgtcgtcggcggcctcgtggtgaccaactgcgccgagttcgacgagcagctcctctggttccagggcggcgtcggccccatcccgtcccccttcgacgcctacctcaccgcccgcggcatcaagaccctggccgtgcgcatggagcgccactgcgacaacgccgaggccatcgccgcgcacctcgaggcctccgaccaggtcgcgaccgtgctctaccccggcctcgagtcccacccgggccacgaggtggccaagcgccagatgaagcgcttcggcggcatgatctccgtgcgcttccgctccgaggaggccgcccgcgtcttctgcctgaacacccgactgatctgtctggccgagtctctcggcggcgtcgagtcgctcgtcgagcacccggccaccatgacccaccagtccgccaccggctcccagctggaggtcccgcgtgacctggtgcgcatctccatcggcatcgaggacgtcgaggacctcatcgcggacatcgacgtcgccctccaggccgtcgcggccgcggaggcggccgctgaggcctccgtcgacgcctgagtgatgaccgccccgcacacggtcgagaggacatgtgcgggacggctcctcccgggcggcgcagtgtcgagacgggtactcctcccgaacatgtgagcccgcccctggctccggccccctcagggcagccggatcgccgccacaccgaccaccatgagcgccaggcccaccgcctggaccagggtggtcggtttcctcttcgcccccagcagcccgaagtggtcgatgaggaggctgccgaccatcatgccgagcaggatcgtcatgacggtcagacccgtgccgatgacgggggagagg

SEQ ID NO: 56 - protein, 397 aa, Corynebacterium humireducens
VADMTHGLSGFSSRSIHAGYEPDSLYGPINTPIYASTTFAQDGLNELRGGFEYTRCGNPTIDALEKTVAALEGAQYGRAFSSGMAATDVILRILLRPGDHLILGHDAYGGTWRLIDQAFGQWGVEYTVVDTTDVAAVEAALRPNTKLIWLETPTNPALSITDIAAIAAIKQQAALVVDNTFASPYLQQPLALGADHVLHSATKYLGGHSDVVGGLVVTNCAEFDEQLLWFQGGVGPIPSPFDAYLTARGIKTLAVRMERHCDNAEAIAAHLEASDQVATVLYPGLESHPGHEVAKRQMKRFGGMISVRFRSEEAARVFCLNTRLICLAESLGGVESLVEHPATMTHQSATGSQLEVPRDLVRISIGIEDVEDLIADIDVALQAVAAAEAAAEASVDA

SEQ ID NO: 57 - DNA, 1581 bp, Corynebacterium humireducens
  CDS (301)..(1281): gene metF
ggttcacggtgtgctccttgttcagtgggtcattctccctcccagactagcggcgaagcctcgatcagggcgggtttccggatgtgtggaacctggggaaatgaaactgaaccgcttggtccatttttgtccgaaaatcggccctcgggggtgaattatattcatgctagggtggggttatcgccgcaggtcacgcggcaaaccggaaatagcacctttaggaaaattacccgccgcaaaccgttggcttgctacattcacagccacttgcccaacgggatgtctgaaggaggaaaacacatgaacgcaaacgcgccgcagtacagcgccaagcgtcgattctccgcctccgccccgttggacaccttcgatcccgaggaatggcgccaggcccccgtgccggagcgcacctccctctccttcgaggtcatgcccccgcgccacgacgcggacgaggccaagatcgacgaactgctggacacgctgcagtcctacaacccggactacatctccgtcaccagctcccggaactccggctggctcgagggcaccgcgaagttcatcgcgaagatcagcgcccagacccgcatcccgacggtcgcccacctggcctgcaccgccggcacccgcgaggagctcatcggctggatcaaccggctcatggactccggcgtccgcggcctgctcgccctccgcggcgacctcgcagaaggacagaccggtatgcctgagggttacctcaagcacgcgaccgacctcatcaacctcatccaggagatcgaggaggagcaggtcgcccgcttcggcgccggccgcctcgccatcggcgtcgccgcctaccccagcggccacgaggagtcgaccagccgcgacgaggacatcgacgtcctcctggccaagcagcgcctgggcgccgacttcgccatcacccagctcttcttcgacgccgaggactacctccgcttcctggagcgcgcccgcctggcaggcgtccgcatcccgctcatccccggcatcatgccgatgacgagcgtcgcgagactacgtcgaatgggacagctctccggccttaccgtccccgaccggctgatcagccgactggaggcggcaggcccggagagcgagtaccagacgggcctcgacctcacggccgagctcgcgcagaccatcctggacgccggtgccggggggatgcacgtgtacacgttcaaccggccggacaccaccaccgaactgctggaccgcatcggcatcacccccgaccctcgggttagggagtgaggcgggagaccgccgccgctgcatctcatgttgatagcgacctgctgcacgcaccgggagcccccgaagcagaccaggttgtacacccaagattttccgaaaggcctcccttttcatgtcttccaccgctttccccaccttcaccatcgagggctacccgcgcgtcggcgccaaccgcgagctcaagaaggccctcgagtccttctgggccggccgcatcgacgaggagaccttcatctcctccgcgcactccatccgcctggagaactacgcccgtctgcgtgacctcggcctggacca

SEQ ID NO: 58 - protein, 326 aa, Corynebacterium humireducens
MNANAPQYSAKRRFSASAPLDTFDPEEWRQAPVPERTSLSFEVMPPRHDADEAKIDELLDTLQSYNPDYISVTSSRNSGWLEGTAKFIAKISAQTRIPTVAHLACTAGTREELIGWINRLMDSGVRGLLALRGDLAEGQTGMPEGYLKHATDLINLIQEIEEEQVARFGAGRLAIGVAAYPSGHEESTSRDEDIDVLLAKQRLGADFAITQLFFDAEDYLRFLERARLAGVRIPLIPGIMPMTSVARLRRMGQLSGLTVPDRLISRLEAAGPESEYQTGLDLTAELAQTILDAGAGGMHVYTFNRPDTTTELLDRIGITPDPRVRE

SEQ ID NO: 59 - DNA, 1695 bp, Corynebacterium humireducens
  CDS (301)..(1395): gene metX
tccgcctgtcggtgggcatcgagaagatcaccgacatcatcgccgacctggagaacgccctgaacgccgtctaagagacagcttggtccacatacattcacgtcccccacctggggagacgtggatgtcggcgacccttctgtttgcgtggtcacgcgcggaaacctaccctttcaggagaccgtgccgaatgtaggcaccgaggacgacaaactgtcccccgggacccccaccagaccactaggacggtgagtttccatctctaccctcaacctggccccccagggcgaactcgcgcaggtgcgcatcggtgatctccacacggaggccggtggcgtcatcaacgacgtcaccatcgcctaccgccgctggggcgagttccggggagacccggacgggatgaacaacctcgtgctcatcgaacacgccctcaccggcgacaccaacgtcgccgactggtggtgtgacctgctcggccccggccgggcgctcgacaccgacgcgtggtgcatcgtgtgcaccaacgtcatcggcggctgccagggctcgaccggccccgcctccgaacaccccgacggcggccgctggggatcccgcttcccggcgatctccatccgcgaccaggtcaccgcggagaagcagttcctcgacgccctcggcgtctcccgcatccacgccgtcctcggcggttccatgggcggtgcccgcaccctcgagtgggcgatgatgtacccggacaaggtcaacgccgtgtgcgtcatcgccgtctccgcccgggccagcgcctggcagatcggcatccagtccgcgcagatctccgccatcgagcgtgaccccgcctggcagggcggcgacttctacgacaccggtgcctcccccgacgccggcctcgccgccgcccgccgcatcgcccacctcacctaccgcggtgagcaggagctcgacgagcgtttcggcgccgcccgccaggacggggagaacccgctgggcaccttccgggaccccgcccagcgtttcgccgtcgagagctacctgcagtaccacggccgcaagctggtcgagcgtttcgacgccggcagctacgtcaccctcaccgaggccctcaaccggcacaacatcggccggggccgcgggggcctgaacaaggcgctggcggcctgcacggtgccgacgatgatcgtcggcgtcgacacggacatcctgtacccgtaccaccagcaggagcacctctcccgcaacgtcggtgagctgatgggcatcgcccggatctcctcccctgtcggccacgacgccttcctggcggagttccggcagatggaccgcatcctccggcgcttcttcgtcctcagcgtgctggacgaggacgcccaggaggacgacggctacctcatctagcaacccgaacgtgccgcgagggggctcccagccatcggttgggagccccctcgcggcacgtttcgcggggtcacgagcccagcgcgtccaccgaggccgccaggaacgccatcgtccccccgaggacggtgcagaaggcggcgtcgaaacgccgggagcgcacggcgaacaccccgacgatgcgggagtcgcacgcgtagcgcaccacggccagccacatgagtgagacgccgagcacgaacgtcgcgcggcgccagtgctcggtgagcgcgaagacgctcgccacgaccacgccgagca

SEQ ID NO: 60 - protein, 364 aa, Corynebacterium humireducens
VRIGDLHTEAGGVINDVTIAYRRWGEFRGDPDGMNNLVLIEHALTGDTNVADWWCDLLGPGRALDTDAWCIVCTNVIGGCQGSTGPASEHPDGGRWGSRFPAISIRDQVTAEKQFLDALGVSRIHAVLGGSMGGARTLEWAMMYPDKVNAVCVIAVSARASAWQIGIQSAQISAIERDPAWQGGDFYDTGASPDAGLAAARRIAHLTYRGEQELDERFGAARQDGENPLGTFRDPAQRFAVESYLQYHGRKLVERFDAGSYVTLTEALNRHNIGRGRGGLNKALAACTVPTMIVGVDTDILYPYHQQEHLSRNVGELMGIARISSPVGHDAFLAEFRQMDRILRRFFVLSVLDEDAQEDDGYLI

SEQ ID NO: 61 - DNA, 1872 bp, Corynebacterium humireducens
  CDS (301)..(1572): gene metY
ccaagttggagcggcgcggcatcaagttcgcgatggcgcgcgtgaagcaggacctctaccgacgcctcgagcccaccggcttcatcgaccacgtcggccgggactacattttcgagacgctgcccaccggggtgcgggcctacgccaaccgctaccaggcccggcacggacgctggccggacggggtgccgcgcgaggtggtcgagccctgacgcggacggggtggaccccgagctcatgcccgcggcgggtacatttgcattcaggtattccgtcgccccgaaaggtgtctgcatcaccatgcacaaccagaccaagctcatccactccggctatgtcccgggcaacaaggacccccgacaggtgccgatcgtgcagtccacgacctacaccttcgactcctccgaggacatcgcggcggtgttcgatgagccgacccacgcgctgatctactcccgcttcgccaacccgaccgtcatggcggtggagacgaagatcgccgagctggagggcggtgccgcggcgatggcgacctcctccggccaggccgcgaccgcgctgtcgatcatgaacgtctgctcggcgggtgactccttcgtggcctcctccgagatctacggcggcaccctcaacctcttccacacgacgctcaagcgtttcggcatcgaggtcatctacgtcgaccaggacgcctccgaggaggagatcgccgccgccttcaagccgaacacgaaggcactgttcggtgagaccatcggcaacccggcgatgagcgtgctggacatcgagaagttcgcccgcatcgcccacggtcagggcgtgccgctcatcgtcgactccaccttcgccaccccgatgctgtgccgccccatcgagcacggcgccgacgtggtcatccactccacctccaagtacatggacggccacgcgctgcaggtcggcggcatgatcgtcgacgccggcaccttcgactacaccaacggcaagttcccgggcttcaccgagccggacgagtcctaccacggcgtcgtgtacaccaaggactacgccgttgcccccttcatcatcaaggcccgcatgcagctgcagcgtgatttcggcgcctacccgtccgcgcactccgccttcatgctcaaccactccctcgagagcctcgacgtgcgcatgcagcgccactgcgagaacgcacagagggtcgccgagtacctcgagggccgcaaggacgtgcttgtcgacgtccgctaccccggactcgactcctccccgtaccgcgagctggcgaagaagtacctcagcggcaactccggcgtgctgtgcatcgacatcaaggggggccgcgaggccggcgtgaagttcatggacgccctcgagctggtcacccgccaggtgcacgtcgccgacgcccgttcctgcgtgctgcacccggcgtcgaccacgcaccgccaggtgccggacgagcagctgccgtccgtcggcatcaccccgggtctggtgcgcatctccgtcggcctggagaacgtcgacgacatcatcgccgacatcgagcaggccctggagaagtcccaggcctaagttcgcttatcgacgccgccccggtccctcatgtgggaccggggcggtggctttcgggggatggctgcactttcaccccgactgggtgcgtgtcgacaacggggtttgggggacagcgatgagggtataagtgcagacacggagaaggcccggacactgtgggaggtgtccgggccttgggggcgtcgataagcggtgtctctagaactccggcagcggcagaacagtgagggagaacatcgcgacgatggccatgaccagcgggatggcgatcatgatcggggcggcgatagccgggtt

SEQ ID NO: 62 - protein, 423 aa, Corynebacterium humireducens
MHNQTKLIHSGYVPGNKDPRQVPIVQSTTYTFDSSEDIAAVFDEPTHALIYSRFANPTVMAVETKIAELEGGAAAMATSSGQAATALSIMNVCSAGDSFVASSEIYGGTLNLFHTTLKRFGIEVIYVDQDASEEEIAAAFKPNTKALFGETIGNPAMSVLDIEKFARIAHGQGVPLIVDSTFATPMLCRPIEHGADVVIHSTSKYMDGHALQVGGMIVDAGTFDYTNGKFPGFTEPDESYHGVVYTKDYAVAPFIIKARMQLQRDFGAYPSAHSAFMLNHSLESLDVRMQRHCENAQRVAEYLEGRKDVLVDVRYPGLDSSPYRELAKKYLSGNSGVLCIDIKGGREAGVKFMDALELVTRQVHVADARSCVLHPASTTHRQVPDEQLPSVGITPGLVRISVGLENVDDIIADIEQALEKSQA

SEQ ID NO: 63 - DNA, 4014 bp, Corynebacterium humireducens
  CDS (301)..(3714): gene pyc
cggcaccggaccaccgcgacgcccacggcactgcccacacattggggtggtgcgcgtgggtttcgctgttcggaacacctgtcggcccattccgcagggcgggacagaaacggcctttcgggcgcccgtcccgcggagtgcggaaatggaccgcaccgggtccaccacctgcagataccccctgtgactaggggatactcccccgaagacaaccctctttcttgcgatactgtggtgtgccagagagctcacccgctctcagacacacccccgacatgacgttcggaaaggaaccccaccgtggccacaaccactctgccagccttcacaaaggtgctggtcgccaaccgcggcgagatcgccgtccgcgccttccgtgccgccttcgagaccggtgcctccaccgtcgcggtctacccgaaggaggaccgcaactcgcaccaccgctccttcgcctccgaggccgtgcgcatcggcaccgagggatcgccggtcaaggcgtacctcgacatcgacgagatcatccgcgccgccaagaagacccacgccgacgccgtctaccccggctacggtttcctctccgagaacgcccagctcgcccgcgagtgcgccgagaacggcctcaccttcatcggcccgccgccggaggtcctcgacctgaccggcgacaagtccgccgccgtcgaggccgcccggaaggccggactcccggtcctgcaggactccgagccgtccaccgacatcgacgagctcgtcgagatgtcgaaggacttcaccttcccgatcttcgtcaaggccgtcgccggtggcggtggacgtggcatgcgcttcatcgagaagcccgaggacgtcgcccagctggccaccgaggcctcccgcgaggcggaggccgccttcggtgacggtcatgtctacctcgagcgtgcggtgctcaacccgcagcacatcgaggtccagatcctcgccgaccacaccggcgacgtcatccacctctacgagcgtgactgctccctgcagcgccgccaccagaaggtcgtggagatcgccccggcccagcacctcgacccagccctgcgcgaccagatctgcgccgacgccgtgaagttctgccgctccatcggctacgtgtgcgccggcaccgtcgagttcctcgtcgacgagaacggcaaccacgtcttcatcgagatgaacccgcgcatccaggtcgagcacaccatcaccgaggaggtcacctccgtcgacctggtcaaggcgcagatgaacatcgccgccggcgcgaccctcaaggacctcggcctcacgcaggagtccatcaagctccacggcgcggccctgcagtgccgcatcaccaccgaggacccggccaacaacttccgcccggacaccggcaccatcaccgcgtaccgctccccgggtggcgcgggcgtgcgtctcgacggcgccgcgtccctcggcggcgagatctccccgaacttcgactccctgctggtcaagatgacctgccgcggcgccgacttcgccaccgccgtcgcccgtgcccagcgcgcgctcaacgagttcaccatctcgggcgtggccaccaacatcggcttcctccgcgccctgctgcgcgaggaggacttccagacccgccgcatctccaccaacttcatcggcgagcacctccacctgctgtccgccccgccggccgacgacgaggccggccgcatcctcaactacctcgcggacgtcaccgtcaaccgtccgcacggcaagcgccccaccgagatccgtccggtgaccaagctgccggcccgcgacgacagcccgctgccgcgcggttcccgcgacgtcctgcgtgacctgggcccgcagaagttcgccgagcagctgcgcaaccaggacgccctggccgtcaccgacaccacgttccgtgacgcgcaccagtcgctgctggccacccgcatccgttcctccgcgctcgtcgccgccgccgagcacgtcggccgcctgaccccggagctgctctccgtcgaggcgtggggcggtgcgacctacgacgtcgcgatgcgtttcctccacgaggacccgtgggagcgtctcgacgacctgcgccgcgccatgccgaacgtcaacatccagatgctgctgcgcggccgcaacaccgtcggctacacctcctacccggacagcgtcggccaggccttcgtcaaggaggccgccgactccggcgtcgacatcttccgcatcttcgacgccctcaacgacgtggaccagatgcgcccggccatcgatgccgtcctggagaccggcaccaccgtcgccgaggtcgccatggcctactccggcaacctgctggacccgaacgagaagctctacacgctcgactactacctccgtctggccgaggagatcgtcgagtccggtgcccacatcctggccatcaaggacatggccggtctgctccgcccgaccgcggcctcccgcctggtgaaggcgctgcgcagcaacttcgacctgccggtgcacgtgcacacccacgacaccgccggcggtcagctggcgacctacctggccgccgcgcaggcgggtgccgacgccgtcgacggcgcctccgccccgctggccggcacgacctcgcagccctcgctgtccgcgatcgtcgcggccttcgccgacacccaccgcgacaccggcctgtccctgcaggccgtgtccgacctcgagccctactgggaggccgtgcgccagctctacgcccccttcgaggcgggcgtgcccggcccgacgggccgcgtgtacaagcacgagatcccgggtggtcagctgtcgaacctgcgcacgcaggccaaggccctgggtctggaggaccgcttcgagctcatcgaggactactacgccgccgtcaacgagatgctgggccgccccaccaaggtcaccccgtcctccaaggtcgtcggcgacctggcgctccacctcgtcggcgcgggcgtcgacccgcacgacttcgccaatgacccgcagaagtacgacatcccggactccgtgatcgacttcctccgcggtgacctcggcaacccgcccggtggctggccgatgctgcgggagaaggccctggcaggtcgttcctccacgcagtccaagcttgtcgacgtcgccccggaggacgaggaggccctgcagagcgcggaccgccagacccgccgctcgaccctggacaggctgctgttcccgaagcaggccgccgagttcgcggagcaccgccgccagtacggcaacaccgccgccctcgaggaccgcgtgttcttctacggcctcaaggagggcgaggagaacgtcatccgcctcatcggggagcacggtcagccgccgatggtcgtgcgtctcgacgccgtcggtgagcccgacgagaagggcatgcgccaggtggtgaccaacgtcaacggccagatccgtccgatgaaggtccgtgaccgctccgtcgagtcggtcaccgcctccgcggagaaggccgacaccaccaacccgggccacgtcgccgcgccgttcgcgggtgtcgtcatggtcaccgcgaaggtgggcgacgaggtcaaggccggcgacccggtagccgtgatcgaggccatgaagatggaggccaccatcaccgcctccaaggacggcgtggtcgaccgcgtcgccctggcccaggccacgaaggtggagggcggcgacctcatcgtcgtcatcgcctagccgcacaacgcgaaagccccgccactccttccgggagtggcggggcttctctgtgcgggtgggccgctacttgatctcgagcaggacctggcccttggtcacgccggcaccggcctcgacggacaggccctcgaccttgcccgacttgtgggccttgaccgggttctccatcttcatggcctcgaggaccacgacgacgtcgccctcggcgacctcctggccgtcctcgacgttgaccttgatgacggtgccctgcatcggggccgccacagcgtcaccggaggcacctgcggcaccgcc

SEQ ID NO: 64 - protein, 1137 aa, Corynebacterium humireducens
VATTTLPAFTKVLVANRGEIAVRAFRAAFETGASTVAVYPKEDRNSHHRSFASEAVRIGTEGSPVKAYLDIDEIIRAAKKTHADAVYPGYGFLSENAQLARECAENGLTFIGPPPEVLDLTGDKSAAVEAARKAGLPVLQDSEPSTDIDELVEMSKDFTFPIFVKAVAGGGGRGMRFIEKPEDVAQLATEASREAEAAFGDGHVYLERAVLNPQHIEVQILADHTGDVIHLYERDCSLQRRHQKVVEIAPAQHLDPALRDQICADAVKFCRSIGYVCAGTVEFLVDENGNHVFIEMNPRIQVEHTITEEVTSVDLVKAQMNIAAGATLKDLGLTQESIKLHGAALQCRITTEDPANNFRPDTGTITAYRSPGGAGVRLDGAASLGGEISPNFDSLLVKMTCRGADFATAVARAQRALNEFTISGVATNIGFLRALLREEDFQTRRISTNFIGEHLHLLSAPPADDEAGRILNYLADVTVNRPHGKRPTEIRPVTKLPARDDSPLPRGSRDVLRDLGPQKFAEQLRNQDALAVTDTTFRDAHQSLLATRIRSSALVAAAEHVGRLTPELLSVEAWGGATYDVAMRFLHEDPWERLDDLRRAMPNVNIQMLLRGRNTVGYTSYPDSVGQAFVKEAADSGVDIFRIFDALNDVDQMRPAIDAVLETGTTVAEVAMAYSGNLLDPNEKLYTLDYYLRLAEEIVESGAHILAIKDMAGLLRPTAASRLVKALRSNFDLPVHVHTHDTAGGQLATYLAAAQAGADAVDGASAPLAGTTSQPSLSAIVAAFADTHRDTGLSLQAVSDLEPYWEAVRQLYAPFEAGVPGPTGRVYKHEIPGGQLSNLRTQAKALGLEDRFELIEDYYAAVNEMLGRPTKVTPSSKVVGDLALHLVGAGVDPHDFANDPQKYDIPDSVIDFLRGDLGNPPGGWPMLREKALAGRSSTQSKLVDVAPEDEEALQSADRQTRRSTLDRLLFPKQAAEFAEHRRQYGNTAALEDRVFFYGLKEGEENVIRLIGEHGQPPMVVRLDAVGEPDEKGMRQVVTNVNGQIRPMKVRDRSVESVTASAEKADTTNPGHVAAPFAGVVMVTAKVGDEVKAGDPVAVIEAMKMEATITASKDGVVDRVALAQATKVEGGDLIVVIA

SEQ ID NO: 65 - DNA, 2190 bp, Corynebacterium humireducens
  CDS (301)..(1890): gene serA
cgacttcgccaacttcctccgcgaccgccgttcccgctacgtcggcatggtcgagtacgcgatggacaagcccgtggtccgcgacgtcgacgacagtgactacacggggggcgaggagggcccgaacgcgttcactgactgaacgggggtgaccggtggagtggtgtgcctcatatcggggcagggtatgggacaaggcgcaaccccacagactaaagtgttatccgttcctcgttcctggttcggtcgggtgcgctgaccggccccggggcctcattttcaaatcaggagatatcacacgtgagcaagcccgtcgtcctcatcgccgacaaactggcaccttccaccgtagatgcgctcggagacgccgtggaggtgcgctgggtcgacggcccgaacaccccggagctgctcgccgccgtcccggaggcagacgcactgctggtccgttccgcgaccaccgtcacccgtgaggtcctcgaggccgcaccgaacctgaagatcgtcggccgcgccggcgtcggcctggacaacgtcgacatcgacgccgccaccgagcgtggcgtcatggtcgtcaacgccccgacctccaacatccactccgcctgcgagcacgccatcgccctgctcatggccaccgtgcgccagatcccggccgccgacgccaccctgcgtgagggcgagtggaagcgttccgccttcaagggcgtggagatcttcggcaagaccatcggcatcgtcggcttcggccacatcggccagctcttcgcccagcgtctgtccgccttcgagaccgagatcatcgcctacgacccgtacgcgaacccgacccgcgccgcccagctcggcgtcgagctggtcgagctggaggagctggtctcccgcgccgacatcgtcaccatccaccttccgaagaccaaggagacggccggcatgttcaacgccgagctgctcgccaagtccaagaagggccagatcatcatcaacgccgcccgcggtggcctcgtcgatgagcaggcactggctgacgccatcaagtccggccacatctggggcgccggcttcgacgtcttctccaccgagccgtgcaccgactccccgctgttcggcctgccggaggtcgtcgtgaccccgcacctgggtgcctccaccgaagaggcccaggaccgtgccggcaccgacgtcgccgcctccgtcctcaaggccctggccggcgagttcgtcccggacgccgtgaacgtctccggcggccgcgtcggcgaggaggtcgccctgtggttggacctgacccgcaagctgggtctgctggccggtcagctgctggactccgccccggtcgacctcgaggtcgaggcccgcggcgagctctccaccgaggacgacctgtccgtgctcggcctgtccgccgtccgtggcctgttctccgccaccaccgacgagccggtcaccttcgtcaacgccccgcagatcgcggagagccgtggcctggactacaaggtcgacaccgcgaccgagtccaccacccaccgttcctccgtcgaggtcaaggtcatcggtgcggacggctcctcccgctccgtcgtcggtgccctgaccggcctggagcgcgtcgagaagatcgtgcgcatcgacgagcgcggcctggacatgcgcgccgagggtcgcaacctcttcctcgagtacaccgacgccccgggcgccctgggcaaggtgggctcccagctgggcgacgccggcatcaacatcgaggccgccgccctcacccaggccaccaagggtgacggcgccatcctgatcctgcgtgtcgacgcagagatcccggaggcactgcagaagcagatcgccgagtccctgggtgccaccaacgatatccagctcaacctggactagtctccggtcgccccgtcgacggcgtgtcgcgtcggtccctcgcggatcgcgcggcacgccgttcgcgtttctgcgggaggcagtttcattcatgccgcctgaccgggaaatgtgcaggtagacagtatggttcattccaggcgcgccgttaatagaccgaacggtatggactaactagacggggaagtgttgaatgggtcaggcaacgaaccgactgatccaggagtaccccgtgtccgacctcaccccgaaccacaccgccggcgaaccgctcgagcccatcgacgcgcagaagctcgc

SEQ ID NO: 66 - protein, 529 aa, Corynebacterium humireducens
VSKPVVLIADKLAPSTVDALGDAVEVRWVDGPNTPELLAAVPEADALLVRSATTVTREVLEAAPNLKIVGRAGVGLDNVDIDAATERGVMVVNAPTSNIHSACEHAIALLMATVRQIPAADATLREGEWKRSAFKGVEIFGKTIGIVGFGHIGQLFAQRLSAFETEIIAYDPYANPTRAAQLGVELVELEELVSRADIVTIHLPKTKETAGMFNAELLAKSKKGQIIINAARGGLVDEQALADAIKSGHIWGAGFDVFSTEPCTDSPLFGLPEVVVTPHLGASTEEAQDRAGTDVAASVLKALAGEFVPDAVNVSGGRVGEEVALWLDLTRKLGLLAGQLLDSAPVDLEVEARGELSTEDDLSVLGLSAVRGLFSATTDEPVTFVNAPQIAESRGLDYKVDTATESTTHRSSVEVKVIGADGSSRSVVGALTGLERVEKIVRIDERGLDMRAEGRNLFLEYTDAPGALGKVGSQLGDAGINIEAAALTQATKGDGAILILRVDAEIPEALQKQIAESLGATNDIQLNLD

SEQ ID NO: 67 - DNA, 1848 bp, Corynebacterium humireducens
  CDS (301)..(1548): gene serB
cgtatccgctccgagcgcccggcgttcgagctgcactacccgcacatggttgagcgcatgcgtcgcgaggcacacaccggtgcccacgacgagcgcgcggagatcacccagactccggctccggccgaggtccgctaaaagggtttgacatagacccctccgactgacacgacccccggtagatccctctaccgggggttgcggcatgttcgaaaccccctcccatgaaagaatgatcccgtggcagatcaagctcagaaccccgataccgccgacaccgaagcacagcagcagctgcaggtggcgctccagcccggactggagtccgcagtcatcaccctcaccggccgtgaccggccgggcgtgacggccgccttcttccgcgtcctgtccgctcacgacgtccagcttctcgacgtcgagcagtcccagttccgtggatacctctccctcgccgcctacgtgggcgtcgacccggagcgcgtcgaccgtctccgcgagggcctgaccgagaccctcaagggccacgggcagctcgccaccgtcgagatggtcccggagggccagcactccagcccgcggtccacgcacgtggccgtcgtcctgggcaacccggtgaccgccaccgacgtgtcggccatcggtcagacgctggccaactacggcgcgaacatcgaccgtatccgcggcatcgcggactacccgatcaccggcctggagatcatgatcacgatcgccaacccggagccgggcggcggcaaggccatgcgtaaggcactggcggagctgaccaccgagctgggcgtcgacatcgccatcgagcgtgccggcctgctgcgccgctccaagcgtctggtcatcttcgactgcgactccaccctcatcaccggtgaggtcatcgagatgctggcggcccacgccggcaaggaggccgaggtcgccgaggtcaccgagcgggccatgcgcggcgagctcgacttcgaggagtccctccgtgagcgcgtcgccaccctcgagggtctcgacgcctccgtcatcgacgaggtcgcccgcgacatcgtcctgaccccgggcgcccgcacgaccatccgcaccctgaagaagatgggctaccgcacggccgtcgtctccggtggcttcatccaggtcctcgaggacctggccgaggacctccagctcgactacgtccgcgcgaacaccctggagatcgtcgacggcaagctcaccggccgcgtgaccggtgacatcgtcgaccgtgcccgcaaggcggagctgctgcgcgagttcgccgaggactccggcctgcagatgtaccagaccgtggccgtgggtgacggtgccaacgacatcgacatgctctccgcggcgggcctgggcatcgcgttcaacgccaagccggcgctgcgcgagatcgccgacacctccgtcaaccaccccttcctcgacgaggtgctccacatcctgggcgtcccgcgcgaggagatcgacgagtccgacctggaggacggcaccttccgccgggtcccgctcgaggtctccgcacggtagtggaggagaccgatccgctcgccctcgcgcacgccctcctgagcgcgcgggtgagcgacaaccggcacgaccgctccgagaacccggagcagcaggagaccgtgcaggcgatgcagatcgccctgcacgtgccgaagacacaaccgccccgccgtaccgacctcctcgaggccgcggcgcgggcggttgtcgccgtctgcctctccgacagggtcgcgggggacccgtcctggcgggcggggctggagggctggtacgaccacctcatccgcaaggtgacccgccgggcccgcaacaagg

SEQ ID NO: 68 - protein, 415 aa, Corynebacterium humireducens
VALQPGLESAVITLTGRDRPGVTAAFFRVLSAHDVQLLDVEQSQFRGYLSLAAYVGVDPERVDRLREGLTETLKGHGQLATVEMVPEGQHSSPRSTHVAVVLGNPVTATDVSAIGQTLANYGANIDRIRGIADYPITGLEIMITIANPEPGGGKAMRKALAELTTELGVDIAIERAGLLRRSKRLVIFDCDSTLITGEVIEMLAAHAGKEAEVAEVTERAMRGELDFEESLRERVATLEGLDASVIDEVARDIVLTPGARTTIRTLKKMGYRTAVVSGGFIQVLEDLAEDLQLDYVRANTLEIVDGKLTGRVTGDIVDRARKAELLREFAEDSGLQMYQTVAVGDGANDIDMLSAAGLGIAFNAKPALREIADTSVNHPFLDEVLHILGVPREEIDESDLEDGTFRRVPLEVSAR

SEQ ID NO: 69 - DNA, 1731 bp, Corynebacterium humireducens
  CDS (301)..(1431): gene serC
ctgtgcagttgtgctgccaccgcacggtgtttgcgctgctcccttggggggagggccgccgtccatgaggtggaacagggcacagtttagcaaatgatgtgatggaggcaacagatttcagaaaagcaggtcacccccattgaatttgcgaggataagcccctttgcctaccccagcaactacccccgttgtcggtgtcaaccctaacacccgggttccggtcaacgggtgggaggggagatactaaggttgttctcgattggacagcacttcaccgaccacgaaagggacgtcatctccatgaccgagttccccaccctccccgcagatctcctcccggcagacggtcgtttcggctgcggcccctccaaggtccgcccggagcagatccaggccatcgtcgacggcggccgcgacatcatcggcacctcgcaccgccagccggccgtgaagaatgtcgtcggttcggtccgtgagggcctctccgacctgttctccctgccggagggctacgagatcatcctgtccctcggtggcgccaccgcattctgggacgccgccaccttcggcctcatcgagaagaagtccggtcacctgtcctacggtgagttctcctccaagttcgccaaggcctcccagcaggcaccgtggctggatgagccgaccatcatcgaggccccggccggcgacgccccggagccgcaggccatggagggcaccgacgtcatcggctgggcccacaacgagacctccaccggcgccatggtgccgatcgtccgcccggagggctccgacggctccctcatcgtcatcgacgccacctccggcgccggcggcctcccggtgaacatcgccgacaccgacgtctactacttctccccgcagaagtgcttcgcctccgacggtggcctgtggctcgccgccatgtccccggccgccatggagcgcatcgcgaagatcaaggagtccggccgccacatcccggcgttcctggacctgcagaccgccgtcgagaactccctgaagaaccagacctacaacaccccggccgtgggcaccctgctcatgctggacaaccaggtcaagtggatgaacgagaacggtggcctggacggcatggtcgcccgcaccaccgcctcctccgacgccctgtacaactgggccgaggcccgcgaggagaccaccccgtacgtcaccgacaaggcgaagcgctccctcgtcgtcggcaccatcgacttcgacgactccgtcgacgcggcggtcgtcgccaaggtcctgcgtgccaacggcatcctcgacgtcgagccctaccgcaagctgggccgcaaccagctgcgcatcggcatgttcccggcgatcgactcccaggacatcgtgaccctcaccaaggcgatcgaccacgtcctcgactcgggcgtcgccgccaagtagtcgccaggtagtcgcgggcacccgcacaccacccaacatgcgtcggacctcacacggtccggcgcatgtctgcgttagggtggtattcatcacgagagaaggagaacgcatgcgcgagttgttcctcgtccctgaagagtcctcggccacttccctggtgttccggaccgaggacggcggacagttcttcctcgacgtcacttcactggacgtggcctccacccgtgcgctcctgcttgccgacgtcccggaggacccctcccccacggagtccggcaccgccgccgtcaccgccgtcga

SEQ ID NO: 70 - protein, 376 aa, Corynebacterium humireducens
MTEFPTLPADLLPADGRFGCGPSKVRPEQIQAIVDGGRDIIGTSHRQPAVKNVVGSVREGLSDLFSLPEGYEIILSLGGATAFWDAATFGLIEKKSGHLSYGEFSSKFAKASQQAPWLDEPTIIEAPAGDAPEPQAMEGTDVIGWAHNETSTGAMVPIVRPEGSDGSLIVIDATSGAGGLPVNIADTDVYYFSPQKCFASDGGLWLAAMSPAAMERIAKIKESGRHIPAFLDLQTAVENSLKNQTYNTPAVGTLLMLDNQVKWMNENGGLDGMVARTTASSDALYNWAEAREETTPYVTDKAKRSLVVGTIDFDDSVDAAVVAKVLRANGILDVEPYRKLGRNQLRIGMFPAIDSQDIVTLTKAIDHVLDSGVAAK

SEQ ID NO: 71 - DNA, 1665 bp, Corynebacterium humireducens
  CDS (301)..(1365): gene alanine dehydrogenase
acctctcgctcagccacctgcgccgcgcgacgaactcctcgcggaagtagccgaggtgggcggtcggcccgccgaaggcggtgacgcccagcagcccgaagctgcggatgacctctcctgtggtgccgttgttcttgtctgcggattccttcacgctcgtcatggtagggcggggcgtcgagaagtgcgcgtcgagcgacagtaaccgggattacatcattaaccagccggttccgacgagcgtccggaaggcgcctagtagagtcagtggtcatgcgtatcggaatcccgaaggaaatcatgaacatggagggccgcgtggccctcagcccgctcggggcaggcaccctcgtagccgacggccatgaggtgattgttcaggccggggcgggcgagaactcctcgttcaccgatgccgagtacgaggcgacgggcgcgcgcgtcgtcgcctccgcggaggaggcctggggcgccgagatggtgctcaaggtcaaggagccgctgccggaggagtacggcttcctccgcccggacctcatcctgttcacctacctgcacctggcgtcctcgcgtgagtgcacgaaggcgctgctcgacgccggcaccctgtccctggcgtacgagacggtcctcgacgcccgcggcggcctcccgctgctcaccccgatgtcccaggtcgcgggccgcctcgccgtgcaggagggcgcgcaccacctcatgagctccaaggggggccgcggcgtgctgctcggtggcgtgcccggcaccgccccggcgaaggtcgtcgtcctcggcggcggtcaggtcggcgcctcggccgtcgcgatcgcgcagggtctgcgcgccagcgtcacggtcctcgacctcgacccgcaggtgctcgcgcgtttcgacgacctctaccagggcaacgtccgcaccctgctgtccgacccgatgaccatcgagaccgagcttctcgacgccgacctcgtcatcggcgccgtcctcgtcgccggcgcgaaggccccgacgctggtcagcgacgacctggtcgcccgcatgaagcagggcgccgtgctcgtcgacgtcgccatcgaccagggcggctgcttcgagccctcccgcaagacctcccacgaggacccgacctacgaggtccacggcacccgcttctactgcgtgcccaacatgcccggcgcggtggccaacacctcgacccgggcgctcacctcggcgaccctgccctacgtccgcgcgatcgcggcgggcggcgtggaccgggcggtggacaaccacccgggtctggagccgggcatcatgacctgcgacggccgcctgatcagtgagccagtgaaggaggcgttcccggatcttctcggttgatgagcatcgccgccacccgctccatgtgatcccagatctggtggcggtacccggcggggatggtctcctcgtcgatgctgtcgagtgacaccttcatcagctccagccagcggatcgcagccgcgcggtccacggggaactcgtggtggcggcggcgcagcatcggggcgccgcgcttctcgttgaaggtggccggtccgccccagtactgggcgaggaaccacttgaggcggttctcggcgccctcccagtcgtcctcggggtacatgggccccaggatgtcgtccgtcttcacctgcg

SEQ ID NO: 72 - protein, 354 aa, Corynebacterium humireducens
MNMEGRVALSPLGAGTLVADGHEVIVQAGAGENSSFTDAEYEATGARVVASAEEAWGAEMVLKVKEPLPEEYGFLRPDLILFTYLHLASSRECTKALLDAGTLSLAYETVLDARGGLPLLTPMSQVAGRLAVQEGAHHLMSSKGGRGVLLGGVPGTAPAKVVVLGGGQVGASAVAIAQGLRASVTVLDLDPQVLARFDDLYQGNVRTLLSDPMTIETELLDADLVIGAVLVAGAKAPTLVSDDLVARMKQGAVLVDVAIDQGGCFEPSRKTSHEDPTYEVHGTRFYCVPNMPGAVANTSTRALTSATLPYVRAIAAGGVDRAVDNHPGLEPGIMTCDGRLISEPVKEAFPDLLG

SEQ ID NO: 73 - DNA, 1515 bp, Corynebacterium humireducens
  CDS (301)..(1215): gene cysD
cctgaccccgtacgcggggtgggtcaccggcctgcgccgcgctgacggaccgacccgggcgcacgccccggcgctcagccttgacgcgacggggcggctgaagatctcgccgctggtcacgtggtccctcgtggacacggaggcgttcatcgcggaccacgacctcatccgacaccccctgaccacgcagggctacccgtccatcgggtgcgccacctgcaccctccccgtcgccgacggggaggatccccgggccggccgctgggccggacagaacaagacagaatgcgggctccactcatgaccaccaccaccctcaccagactctccccccatctgcaggacctcgagaacgagtccatccacatcctccgggaggtggccgggcagttcgaccgggtcgggctgctgttctccggcggcaaggactccgtcgtcgtgctcgagctggcgcgccgggccttcgctccggcggccgtgcccttcgagctgctccacgtggacaccggccacaacttccccgaggtcatcgagttccgtgaccgagtcgtcgccgagaccggcgtgcggctgcgcgtcgcgcacgtgcaggactggatcgaccgcggtgacctcgtcgaacgtcccgacggcacccgcaatcccctgcagaccgtccccctcgtggagaccatcgccgagcagggctacgacgccgtcctcggtggcgcccgccgcgacgaggagcgggcgcgcgccaaggagcgtgtcttctccgtgcgcgactccttcggcggctgggatccgcgccgccagcgcccggagctgtggcacctctacaacggcggccacctgccgggcgagaacgtccgcgtcttccccatctccaactggaccgaggccgacatctgggagtacatcggcgcccgcggcatcgcgctgccggagatctacttcgcgcatgagcgggccgtcttcgagcgggacggcatgtggctgaccgccggcgagtggggtgggccccgcgagggcgagaccctcgaggtccgccgcgtgcgctaccgcaccgtcggcgacatgtcctgcaccggtgcggtgctctccgacgccaccacggtcgacgacgtcatcgccgagatcgccacctccaccctcaccgagcgcggggccacccgcgccgacgaccgcctcagtgaatccgccatggaagaccgcaagaaggaaggctacttctgatgaccaccacgctcctgcgcacccgcgagacgctgcgcctgtgcaccgccggctccgtcgacgacggcaagtccaccctcgtgggccgcctgctccacgacacccgctccgtcctcgccgaccagctcgccgccgtcgagcgcacctccgccgaccgcggtttccacggcggcctggacctctcactgctcgtcgacggcctccgcgccgaacgcgagcagggcatcaccatcgacgtggcctaccgctacttcgccaccgaccgccgcaccttcatcctcgccgacacccccggccacg

SEQ ID NO: 74 - protein, 304 aa, Corynebacterium humireducens
MTTTTLTRLSPHLQDLENESIHILREVAGQFDRVGLLFSGGKDSVVVLELARRAFAPAAVPFELLHVDTGHNFPEVIEFRDRVVAETGVRLRVAHVQDWIDRGDLVERPDGTRNPLQTVPLVETIAEQGYDAVLGGARRDEERARAKERVFSVRDSFGGWDPRRQRPELWHLYNGGHLPGENVRVFPISNWTEADIWEYIGARGIALPEIYFAHERAVFERDGMWLTAGEWGGPREGETLEVRRVRYRTVGDMSCTGAVLSDATTVDDVIAEIATSTLTERGATRADDRLSESAMEDRKKEGYF

SEQ ID NO: 75 - DNA, 1575 bp, Corynebacterium humireducens
  CDS (301)..(1275): gene cysH
cgtgcgcatcgccgtcaacggctgccccaactcgtgtgcccgcacgcaggtcgcggacatcggcttcaagggccagaccgtcaccgacgccgacggcaaccgggtcgagggcttccaggtgcacctcggcgggtcgatgagcctcaacgccaacttcggccgcaagctccgcggccacaaggtgctcgccgacgacatcggggactacgtcacccgcgtggtcacccacttccgggaccagcgccgaccggaggagaccttccaggagtgggtccagcgcgccgccgaggaggacctccagtgagtttccgtcgcgcccccaacccgaaccgcaaccatccgctgcactgcccgtggtgcgccggcgaggatctgctgcccaacacggaggacgacttcgcctggctgtgccgcgactgcacccgggtgttctccgtccgctaccacgggcaggacgccccggcgcgccgaccggccccggcactctccacgagtgcggcgatccagctctccctgtcccgtcgcggccacctcaacgaccccgccgtcagcccggcaggccccaccgccaccggggacctgccgggggcggtgcgggaggagaacgcgcggctcgtcgagaagcacgcggatgagctgtacgacgcccccgccgacgtcatcctggcgtgggcccgggagcacgtgccgggtcgcctcgcggtgacgctctcgatggagaacaccgtcctcgcggagctggccgcccggcacacgcccgacgccgacctgctcttcctcgacaccggctaccacttcgaggagacgctggcggtggcgcgggacgtcgacaggcggtacccgcagacgctggtgaccgcgacgccgacgctcacccgggcggagcaggacgccgcctacgggcccggcctgtaccggcgcgacccggccgcgtgctgccgcatgcgcaaggtcgagccgctggccgtgcacctgaccccgtacgcggggtgggtcaccggcctgcgccgcgctgacggaccgacccgggcgcacgccccggcgctcagccttgacgcgacggggcggctgaagatctcgccgctggtcacgtggtccctcgtggacacggaggcgttcatcgcggaccacgacctcatccgacaccccctgaccacgcagggctacccgtccatcgggtgcgccacctgcaccctccccgtcgccgacggggaggatccccgggccggccgctgggccggacagaacaagacagaatgcgggctccactcatgaccaccaccaccctcaccagactctccccccatctgcaggacctcgagaacgagtccatccacatcctccgggaggtggccgggcagttcgaccgggtcgggctgctgttctccggcggcaaggactccgtcgtcgtgctcgagctggcgcgccgggccttcgctccggcggccgtgcccttcgagctgctccacgtggacaccggccacaacttccccgaggtcatcgagttccgtgaccgagtcgtcgccgagaccggcgtgcggctgcgcgtcgcgcacgtgcaggactggatcgacc

SEQ ID NO: 76 - protein, 324 aa, Corynebacterium humireducens
VSFRRAPNPNRNHPLHCPWCAGEDLLPNTEDDFAWLCRDCTRVFSVRYHGQDAPARRPAPALSTSAAIQLSLSRRGHLNDPAVSPAGPTATGDLPGAVREENARLVEKHADELYDAPADVILAWAREHVPGRLAVTLSMENTVLAELAARHTPDADLLFLDTGYHFEETLAVARDVDRRYPQTLVTATPTLTRAEQDAAYGPGLYRRDPAACCRMRKVEPLAVHLTPYAGWVTGLRRADGPTRAHAPALSLDATGRLKISPLVTWSLVDTEAFIADHDLIRHPLTTQGYPSIGCATCTLPVADGEDPRAGRWAGQNKTECGLHS

SEQ ID NO: 77 - DNA, 2295 bp, Corynebacterium humireducens
  CDS (301)..(1995): gene cysI
gaaagtagcacccctgggcggtaatgcaagcgaaaaggcgacttcaattcagggtccgggcatcgctcttcgacgcccccaattcaattcagtgaatgtatgtcggatataaacactacgtacagccatgatcgggaaagttgcccaaaatcatgacgtatctacatctctccaccattgccatgaactgatctgtctgctctaatccactgcagacgccccggcaggggctccgtggcggcgcccggcgccgaatccacgtgaatgaaatagacagaacagttcagtagggagatggtcatggacacgaccaccacgatcgagaaggcaccccgccgcgagcgccccagacgcgcccgcaagccggagggccagtggcggatcgacggcaccacgccgctcaaccacgtggaggaggtgaagcaggacggcgacatcctcgccgtctacgaccgggtggtcaacatctactcgaagcagggtttcgactccatccccgccgacgacctcgccccgcgcttcaagtggctgggcctgtacacgcagcgccgccaggatctcggcggtgagctcaccggccagctgcccgacgccgagctgcaggaccgctacttcatgatgcgcgtgcgtttcgagggcggccaggtaaccccggcccgcctccgcgcggtgggggagatctcccgcgactacgcccgcagcaccgcggacttcaccgatcggcagaacatccagctgcactggctgcgcatcgaggacatcccggcgatctgggagaagctcgactccgtggggctcagccccctgctgggctgcggtgacgtgccgcgcatcatcctcggctccccggtcgcgggggtcgccgccgaggagatcatcgacgccaccccggcgatcgagcggatccagcgcgagcacctgccgaacccggagttccacaacctgccgcgcaagttcaagtccgcgatctccggccactcgcgccaggacgtcacccacgagatccaggacgtcgccttcatcggttccgtccaccccgagcacggcccgggtttcgagtgcttcgtcggcggtggcctgtccaccaacccgatgctcgcgcagtcgctcggcgcgtggatcccgctggaggacgtgccggacgtgtgggccggcgtcgcccggatcttccgcgactacggttaccgccgcctgcggaatcgtgcccgtctcaagttcctcgtggcggaatgggggatcgagaagttccgggacgtcctcgagacggagtacctcggacgcccgctcatcgacggaccccgccagcccaccaaccccggctaccgcgaccacatcggcatccacccgcagaaggacggccgcttctacctgggcgtgaagccgaccgtcgggcacaccaccggtgagcagctcatcgccatcgccgaggtggcggagcgtttcggcatcgagcgcatccgcaccacctcggagaaggagctgctcttcctcgacgtcgagcgcaccgacctcaccgccctggccgccgccctcgacgagaccggcctgtactcgaagccgagcgagtggcgccgcaacatcatctcgtgcaccggcctggagttctgcaaactggcgcacgcgacgaccaagtcgcgtgccgtggccctggtcgacgagctggaggaacgcgtcggcgacatcgacgtgcccgtgcgcatcgccgtcaacggctgccccaactcgtgtgcccgcacgcaggtcgcggacatcggcttcaagggccagaccgtcaccgacgccgacggcaaccgggtcgagggcttccaggtgcacctcggcgggtcgatgagcctcaacgccaacttcggccgcaagctccgcggccacaaggtgctcgccgacgacatcggggactacgtcacccgcgtggtcacccacttccgggaccagcgccgaccggaggagaccttccaggagtgggtccagcgcgccgccgaggaggacctccagtgagtttccgtcgcgcccccaacccgaaccgcaaccatccgctgcactgcccgtggtgcgccggcgaggatctgctgcccaacacggaggacgacttcgcctggctgtgccgcgactgcacccgggtgttctccgtccgctaccacgggcaggacgccccggcgcgccgaccggccccggcactctccacgagtgcggcgatccagctctccctgtcccgtcgcggccacctcaacgaccccgccgtcagcccggcaggccccaccgccaccggggacctgccgggggcggtgcgggaggaga

SEQ ID NO: 78 - protein, 564 aa, Corynebacterium humireducens
MDTTTTIEKAPRRERPRRARKPEGQWRIDGTTPLNHVEEVKQDGDILAVYDRVVNIYSKQGFDSIPADDLAPRFKWLGLYTQRRQDLGGELTGQLPDAELQDRYFMMRVRFEGGQVTPARLRAVGEISRDYARSTADFTDRQNIQLHWLRIEDIPAIWEKLDSVGLSPLLGCGDVPRIILGSPVAGVAAEEIIDATPAIERIQREHLPNPEFHNLPRKFKSAISGHSRQDVTHEIQDVAFIGSVHPEHGPGFECFVGGGLSTNPMLAQSLGAWIPLEDVPDVWAGVARIFRDYGYRRLRNRARLKFLVAEWGIEKFRDVLETEYLGRPLIDGPRQPTNPGYRDHIGIHPQKDGRFYLGVKPTVGHTTGEQLIAIAEVAERFGIERIRTTSEKELLFLDVERTDLTALAAALDETGLYSKPSEWRRNIISCTGLEFCKLAHATTKSRAVALVDELEERVGDIDVPVRIAVNGCPNSCARTQVADIGFKGQTVTDADGNRVEGFQVHLGGSMSLNANFGRKLRGHKVLADDIGDYVTRVVTHFRDQRRPEETFQEWVQRAAEEDLQ

SEQ ID NO: 79 - DNA, 1989 bp, Corynebacterium humireducens
  CDS (301)..(1689): gene cysJ
acgtggattcggcgccgggcgccgccacggagcccctgccggggcgtctgcagtggattagagcagacagatcagttcatggcaatggtggagagatgtagatacgtcatgattttgggcaactttcccgatcatggctgtacgtagtgtttatatccgacatacattcactgaattgaattgggggcgtcgaagagcgatgcccggaccctgaattgaagtcgccttttcgcttgcattaccgcccaggggtgctactttcacagaccagtcagtctagtgatttcccgaaaggaacccatgagccagcccaccctccgcatcgccgtcatcggcgccggccccgccggcatctacgcctccgacctcctggtgaagaacgccgcctccatcggccgtgaggtccacgtcgacctcatcgagaagctgcccgcccccttcgggctcatccgctacggcgtcgcccccgaccacccgcgcatcaagggcatcatcacctccctgcaccgcgtcctcgaccgccccgagatccgcctgctcggcaacatcgagatcggccgcgacgtcaccgtcgaggagctgcgcgaacactacgacgccgtcatcttcgccaccggcgccatcgccgaccgcgacctggacatcccgggcgtcgacgcgcagggctccttcggcgccgccgacttcgtcggcttctacgacggcaaccccgagttcccccgcacctgggacctgtccgcgcagtccgtcgccgtcatcggcgtgggcaacgtgggcctcgacgtcgcgcgcgtcctgtccaagaccgccgacgaactcaacgtcaccgagatccccgacaacgtctacgagaccctccgcaccaaccaggccaccgaggtccacgtcttcggccgccgcggccccgcgcaggccaagttcaccccgcaggaactcaaggaactcgaccactcccccaccgtcaacgtcgtcgtcgaccccgaggacatcgactacgacgacgccagcatcgaggcccgcagcagctccaagtcgcaggacctcgtgtgccagaccctcgagggctacgccatccgcgaacccaaggacgccccgcacaccctgcagatccacctcttcgagtctcccaccgagatcctcacccgcgacggccgtgtcgtcggcctgcgcaccgaacgcaccgaactcgacggcaccggccacgtccgcggcaccggcaccttcaccgactggcccgtccaggccgtctaccgcgccgtcggctaccgctccgagccggtgccgggcgtgcccttcaaccatgtcgagcatgtgatcccgaacgacggcggccacgtcctcgaccccgccggcacccccgtccccggcctctacgccaccggctggatcaagcgcggccccgtcggactcatcggcaacaccaagtccgacgccaaggagaccaccgacctcctgctcgccgacgccgccgccggacttctcgacgcccccctccaccccgccgacgccttcctccagcttctcgacgcccgcggcatccccgtcaccacctgggagggctggtaccggctcgacgccgccgagcgcgccctcggcgaggcctccggcgtggagggcaaggagcgccggaagatcgtcgaatgggaggagatggtcagccacgcacacatcaccccggcctatgtgtgatttctcaggctcagggccggcagctgagactgggcagcgctatgccacgggccatgacacgccgggccggataaaaattcctgaccctgagtcgatctaactgcggtaacggtccggtaggcgaattgttaccgatcagcaaccgtccaaattcatacccactaatgtgatcactgttactctcaagagtggaaagtacaactgacaattcttaaggagaaacatcatgcgcggtagcggactcatctggaccatcgtcggcatcctggccatcatcgccctagtcatctggatcatgtc

SEQ ID NO: 80 - protein, 462 aa, Corynebacterium humireducens
MSQPTLRIAVIGAGPAGIYASDLLVKNAASIGREVHVDLIEKLPAPFGLIRYGVAPDHPRIKGIITSLHRVLDRPEIRLLGNIEIGRDVTVEELREHYDAVIFATGAIADRDLDIPGVDAQGSFGAADFVGFYDGNPEFPRTWDLSAQSVAVIGVGNVGLDVARVLSKTADELNVTEIPDNVYETLRTNQATEVHVFGRRGPAQAKFTPQELKELDHSPTVNVVVDPEDIDYDDASIEARSSSKSQDLVCQTLEGYAIREPKDAPHTLQIHLFESPTEILTRDGRVVGLRTERTELDGTGHVRGTGTFTDWPVQAVYRAVGYRSEPVPGVPFNHVEHVIPNDGGHVLDPAGTPVPGLYATGWIKRGPVGLIGNTKSDAKETTDLLLADAAAGLLDAPLHPADAFLQLLDARGIPVTTWEGWYRLDAAERALGEASGVEGKERRKIVEWEEMVSHAHITPAYV

SEQ ID NO: 81 - DNA, 1869 bp, Corynebacterium humireducens
  CDS (301)..(1569): gene cysN
cgcgctgccggagatctacttcgcgcatgagcgggccgtcttcgagcgggacggcatgtggctgaccgccggcgagtggggtgggccccgcgagggcgagaccctcgaggtccgccgcgtgcgctaccgcaccgtcggcgacatgtcctgcaccggtgcggtgctctccgacgccaccacggtcgacgacgtcatcgccgagatcgccacctccaccctcaccgagcgcggggccacccgcgccgacgaccgcctcagtgaatccgccatggaagaccgcaagaaggaaggctacttctgatgaccaccacgctcctgcgcacccgcgagacgctgcgcctgtgcaccgccggctccgtcgacgacggcaagtccaccctcgtgggccgcctgctccacgacacccgctccgtcctcgccgaccagctcgccgccgtcgagcgcacctccgccgaccgcggtttccacggcggcctggacctctcactgctcgtcgacggcctccgcgccgaacgcgagcagggcatcaccatcgacgtggcctaccgctacttcgccaccgaccgccgcaccttcatcctcgccgacacccccggccacgtgcagtacacgcgcaacaccgtcaccggcgtgtccacgtcgcaggtggtcgtcctgcttgtcgacgcccgccacggcgtcgtcgagcagacccgccgccacctcaccgtcgcggcgctcctcggggtgcgcacagtgctcctcgcggtgaataagatcgacctcgttgactggtccgaggccgtcttccgggacatcgaggcggagttcacgtcgctggccaccgacgtcggcgtcgacgacgcgcacgtcatccccgtctccgcgctgctgggcgacaacgtcgtcgaaccctcggcgaacctcccctggtacgaggggccgacggtgctggaactgctcgagagcgtcgaggtccaccgcggccgcgcccacgccctcggcttccgcctgccgatccagtacgtcatccgcgagcactcctccgactaccgcggctacgccgggcgtgtcgacgccggcgtgctcaccgtcggcgacaccgtccacctccccgaggggcgcaccagcaccgtcacccacatcgacaccgccgacggcgaggtccgctccgcccacgccggtgactccgtggtcctgcgcctggccgacgacatcgacctcatccgcggcgacctcatcgccggtgaggaccgcccggagccgacccgctccttcgccgccacactcgtcggactcggcgaccgcaccctgcgccccggctcccccgtgaaggtccgctacggcacctcactcgtgcggggacgcgtcgcggcgatcgagcggctgctcgacatcgacggccgcaccgaccacctctccccggacgacctcggcctcaacgacatcgcccacgtgcgtatcgacgtcgccaccgagctccccgtcgagccctacgccgcccgcggcgccgtcggctccttcctgctcatcgaccaggccagcggcgacaccctcgccgccgggctcgtcggccaccggctccgctgacccgtgaccgccctgctcaccctctcccacgggtcccgccacccgcgcgccgccgccggcgtcgaccgcctcacccgggcggccggggaggtgctgggcgtcaccgcccgcgccgcccacctcgagttcgacaccccctccctcatcgacgccgcccgcgacctcgtcgcccgcggccacgaccacgccgtggtcgtccccctgctgttcaccgacgccttccacgcgcgtcacgacgtccccgccgccctcgacgcggcccgccgcgccaccggcctgcggctcacgcccgcccggggc

SEQ ID NO: 82 - protein, 422 aa, Corynebacterium humireducens
MTTTLLRTRETLRLCTAGSVDDGKSTLVGRLLHDTRSVLADQLAAVERTSADRGFHGGLDLSLLVDGLRAEREQGITIDVAYRYFATDRRTFILADTPGHVQYTRNTVTGVSTSQVVVLLVDARHGVVEQTRRHLTVAALLGVRTVLLAVNKIDLVDWSEAVFRDIEAEFTSLATDVGVDDAHVIPVSALLGDNVVEPSANLPWYEGPTVLELLESVEVHRGRAHALGFRLPIQYVIREHSSDYRGYAGRVDAGVLTVGDTVHLPEGRTSTVTHIDTADGEVRSAHAGDSVVLRLADDIDLIRGDLIAGEDRPEPTRSFAATLVGLGDRTLRPGSPVKVRYGTSLVRGRVAAIERLLDIDGRTDHLSPDDLGLNDIAHVRIDVATELPVEPYAARGAVGSFLLIDQASGDTLAAGLVGHRLR

SEQ ID NO: 83 - DNA, 1248 bp, Corynebacterium humireducens
  CDS (301)..(948): gene cysY
ggactcggcgaccgcaccctgcgccccggctcccccgtgaaggtccgctacggcacctcactcgtgcggggacgcgtcgcggcgatcgagcggctgctcgacatcgacggccgcaccgaccacctctccccggacgacctcggcctcaacgacatcgcccacgtgcgtatcgacgtcgccaccgagctccccgtcgagccctacgccgcccgcggcgccgtcggctccttcctgctcatcgaccaggccagcggcgacaccctcgccgccgggctcgtcggccaccggctccgctgacccgtgaccgccctgctcaccctctcccacgggtcccgccacccgcgcgccgccgccggcgtcgaccgcctcacccgggcggccggggaggtgctgggcgtcaccgcccgcgccgcccacctcgagttcgacaccccctccctcatcgacgccgcccgcgacctcgtcgcccgcggccacgaccacgccgtggtcgtccccctgctgttcaccgacgccttccacgcgcgtcacgacgtccccgccgccctcgacgcggcccgccgcgccaccggcctgcggctcacgcccgcccggggcctcggcaccggccccgacatcgccgacgtccttgcccgccacacccgcccccgcaacccggacctcgtcctcgggcacgtcggatcctcctccgtcgcagccgaggccgccgtccggtcgctggccgacctcctcgccgcccgcctcgggcgggacgtcgcggtggtgcgggcgacgggggagaaggcggcgtcgataagcagcggtgcccacctcgtccccctcttcgtcaccgacgccctgctgctcgaccgcctgcgcgccgcccaaccccacgcgacctccgaccgcccgctcaccgacgccctccgcgacgtcgtggcggcgcggtaccgggccgccctcacctaggaacccaccatgaacacactcctgctcatcgccctcgcggggctcgccgcccagctcgtcgacggcggcctcggcatgggcttcggcgccacctccaccacgatcctcatcgtgctcgccggactcggccccgccacagccagcgccgtcgtccacaccgcggaactgggcaccaccctcgtctccggcgtctcgcactggcgtttcggaaacgtcgactggcaggtcgtccgccgcctcgccatccccggtgccgtgggcgccttcgccggggcaaccgtgctctcccacttatcgacg

SEQ ID NO: 84 - protein, 215 aa, Corynebacterium humireducens
VTALLTLSHGSRHPRAAAGVDRLTRAAGEVLGVTARAAHLEFDTPSLIDAARDLVARGHDHAVVVPLLFTDAFHARHDVPAALDAARRATGLRLTPARGLGTGPDIADVLARHTRPRNPDLVLGHVGSSSVAAEAAVRSLADLLAARLGRDVAVVRATGEKAASISSGAHLVPLFVTDALLLDRLRAAQPHATSDRPLTDALRDVVAARYRAALT

SEQ ID NO: 85 - DNA, 1515 bp, Corynebacterium humireducens
  CDS (301)..(1215): gene cysZ
gacctcgtcctcgggcacgtcggatcctcctccgtcgcagccgaggccgccgtccggtcgctggccgacctcctcgccgcccgcctcgggcgggacgtcgcggtggtgcgggcgacgggggagaaggcggcgtcgataagcagcggtgcccacctcgtccccctcttcgtcaccgacgccctgctgctcgaccgcctgcgcgccgcccaaccccacgcgacctccgaccgcccgctcaccgacgccctccgcgacgtcgtggcggcgcggtaccgggccgccctcacctaggaacccaccatgaacacactcctgctcatcgccctcgcggggctcgccgcccagctcgtcgacggcggcctcggcatgggcttcggcgccacctccaccacgatcctcatcgtgctcgccggactcggccccgccacagccagcgccgtcgtccacaccgcggaactgggcaccaccctcgtctccggcgtctcgcactggcgtttcggaaacgtcgactggcaggtcgtccgccgcctcgccatccccggtgccgtgggcgccttcgccggggcaaccgtgctctcccacttatcgacgcaggccgccgcccccgtcaccgccacgatcctcaccctcatcggcgccaacctcgtgtggcgcttctcccgcggacgcatccacccgcgccgcgccgggaaggggcactcgcgcggcttcctcggcgggctcggcctgttcggcggcttcatcgacgcctccggaggcggcggctggggcccggtgaccacctcgaccctgatgacgctggggcgggcggaaccgcgccgcatcgtcggcacggtcaacaccgccgagttcctggtcaccgccgcggcgaccgccggcttcgtcatcggcctgtgggacgacctggtggccaacctcgcggccgtgctcgcgctgctcatcggcggtgtcatcgccgcgccggtcgccgcgtggctggtcacccgcctcaacccggccgccctcggcggcgtcgtgggcaccctgctggtcgcgctgaacctccccaaggtgctgcccttcgccggaggaccggtgctgctggccgtcatcgtcgtcggcctgggcttctcgtgggtcggctggcgacgctccctccgtgcccgcgccgccgccgggcagcccgtcaccggaacgacgagcacccccaccggacagtcggtgggggtgcggtagggcgggggctacagggcggcgacgtcgccgatgacgtacacggccggggacccgatgcggttcccggccatcgtcgtggccagggttcccaacgtgcaccggaaggaacgctgcccagtggtggtgccctcctggatgacggcggccggggtgtgggggtcgaggccggcgtcgacaagcgtggcggtgatggcggcgacgttgcgcacacccatgatcaccgagatcgtgccgcccgcccgcgccagcgcggcccagtcgacgagcgagtccgggtgccccggcggcagatgcccggag

SEQ ID NO: 86 - protein, 304 aa, Corynebacterium humireducens
MNTLLLIALAGLAAQLVDGGLGMGFGATSTTILIVLAGLGPATASAVVHTAELGTTLVSGVSHWRFGNVDWQVVRRLAIPGAVGAFAGATVLSHLSTQAAAPVTATILTLIGANLVWRFSRGRIHPRRAGKGHSRGFLGGLGLFGGFIDASGGGGWGPVTTSTLMTLGRAEPRRIVGTVNTAEFLVTAAATAGFVIGLWDDLVANLAAVLALLIGGVIAAPVAAWLVTRLNPAALGGVVGTLLVALNLPKVLPFAGGPVLLAVIVVGLGFSWVGWRRSLRARAAAGQPVTGTTSTPTGQSVGVR

SEQ ID NO: 87 - DNA, 2916 bp, Corynebacterium humireducens
  CDS (301)..(2616): gene metE
gactggaggcggcaggcccggagagcgagtaccagacgggcctcgacctcacggccgagctcgcgcagaccatcctggacgccggtgccggggggatgcacgtgtacacgttcaaccggccggacaccaccaccgaactgctggaccgcatcggcatcacccccgaccctcgggttagggagtgaggcgggagaccgccgccgctgcatctcatgttgatagcgacctgctgcacgcaccgggagcccccgaagcagaccaggttgtacacccaagattttccgaaaggcctcccttttcatgtcttccaccgctttccccaccttcaccatcgagggctacccgcgcgtcggcgccaaccgcgagctcaagaaggccctcgagtccttctgggccggccgcatcgacgaggagaccttcatctcctccgcgcactccatccgcctggagaactacgcccgtctgcgtgacctcggcctggaccaggactacgccatcccggccgacgtcgccctctacgaccaggtgctcgagaccggcgtcaccgtcggcctgatcggtggcgacgccgccgaggtcgacctcaccgagtacttcgccctggcccgcggcaccgccgagcgttccccgctcgagatgaccaagtggttcgacaccaactaccactacctcgtcccggaggtcgccgaggacaccgtcatcaccccgcgcccgcagcgcatcctcgacatcgtcgccgaggccaaggaggccggccacaccgtccgtccgttcctggtcggcccggtcaccctgctggccaagtccaaggccgccgagaacgccggcgagggcttcaacccgctgtcccgcctcgaggacctcaccgccgcctacgcccaggtcctcgccgccctcaaggaggccggcgtggagtgggtccagctcgccgagccggccctggtcgccgacctgaccatccgttccgacgccgacctggccgccgacgcgaaggccacctacgaggcgctcctcggctccgaggaccgcccgcaggtcctcatcaccaccccctacggtgccctgcgcaacggcctcgacgccctcgtcgccgccaagccggaggccctgcaggtcgacctcgcaccggtcaccctcgccaacgaggagggctacgtcgagcgcgtcgccaaggcagtcgccggcaccggcatcaccctggccgccggcgtcatcgacggccgcaacatctgggccgccgacctgcgcgagcgcctctccgtcctggaggagctgaagaagggcggcgtcgagaagatcgccgtcacctcctccgtctccctgcagcacgtcccgcacaccgtctccgtggagaagaacctcccggtcgacgtcgccggctggctctccttcgccgacgagaagatcggcgaggcacaggccctggccaccgcactcgagggcggctccgtcgccgccgcagacgccttcgcccgctccgaccgcgccgtgcgcacccgtcgtgagtccgcccgcacccacaaccaggccgtccaggaccgcgtcgccgctctgccggacggccaggtcgcacgcgagccggagttcgagggccgcgtcgaggcacagaaggtgctcaacctgccgaagctgccgaccaccacgatcggctccttcccgcagaccaccgagatccgcaaggcacgcgccgaccaccgctccggcgccctcaccgacgagcagtacaccgacgccctcaaggacgaggtcaagtccgtcatcgagctgcaggagcgcctcggcatcgacgtcctcgtccacggcgagcccgagcgcaacgacatggtccagtacttcgccgagcttctcgacggcttcgtgaccaccgagcacggctgggtccagtcctacggctcccgctgcacccgcccgtccatcgtcgtcggcgacgtctcccgcccgaaggccatgaccgtcgagtgggccaagtacgcccagtccctctccgacaagcacgtcaagggcatgctgaccggcccggtcaccatcctcgcgtggtccttcacccgtgacgacgttccgaagtccgtctccgccgaccagatcggcgtcgccctcgccgacgaggtcgccgacctcgaggccgccggcatcaacgtcatccagatcgacgagccggccctgcgcgagctgctgccgctgcgtgaggaggaccgcccggcatacctggactgggccgtccgctccttccgcctcgtctccctggacgcgaagccgaccacccagatccacacccacctctgctactcggagttcgggcagatcatcgacgccgtcgccgccctcgacgccgacgtcacctccatcgaggccgcccgctcccgcatggagctgctgggtgacctggacgagtccttccactccgagatcggcccgggcatctgggacatccactccccgcgcgtcccggacgtcgccgagctcaccgagctgatcaaggccgccctggtcaacgtcccgaccgagcgcctctgggtcaacccggactgcggtctgaagacccgcggctacgccgagaccgaggcgtccctgcgcaacatggtcctcgcccgcgacctcgtggtcgagtccctgtaacacctgcgtagcaactacgttgcgggcccggttccacttcggtggggccgggcccctcgtgattccgggggcggctagcgctcgtcgatgacctccgcgaaggcggccaccttccggcggagatcctcgatgagggcgtccccgtccctccgggacttctcctccgacgccgggtcatcccagcctgtctcccagtggtggtgggaccgccagtggtcgcaccatgcgtagagccgctgcgtcagcgactcggacaggccgtagtcccgtggcgccatcagataggtgtccgtgccgttc

SEQ ID NO: 88 - protein, 771 aa, Corynebacterium humireducens
MSSTAFPTFTIEGYPRVGANRELKKALESFWAGRIDEETFISSAHSIRLENYARLRDLGLDQDYAIPADVALYDQVLETGVTVGLIGGDAAEVDLTEYFALARGTAERSPLEMTKWFDTNYHYLVPEVAEDTVITPRPQRILDIVAEAKEAGHTVRPFLVGPVTLLAKSKAAENAGEGFNPLSRLEDLTAAYAQVLAALKEAGVEWVQLAEPALVADLTIRSDADLAADAKATYEALLGSEDRPQVLITTPYGALRNGLDALVAAKPEALQVDLAPVTLANEEGYVERVAKAVAGTGITLAAGVIDGRNIWAADLRERLSVLEELKKGGVEKIAVTSSVSLQHVPHTVSVEKNLPVDVAGWLSFADEKIGEAQALATALEGGSVAAADAFARSDRAVRTRRESARTHNQAVQDRVAALPDGQVAREPEFEGRVEAQKVLNLPKLPTTTIGSFPQTTEIRKARADHRSGALTDEQYTDALKDEVKSVIELQERLGIDVLVHGEPERNDMVQYFAELLDGFVTTEHGWVQSYGSRCTRPSIVVGDVSRPKAMTVEWAKYAQSLSDKHVKGMLTGPVTILAWSFTRDDVPKSVSADQIGVALADEVADLEAAGINVIQIDEPALRELLPLREEDRPAYLDWAVRSFRLVSLDAKPTTQIHTHLCYSEFGQIIDAVAALDADVTSIEAARSRMELLGDLDESFHSEIGPGIWDIHSPRVPDVAELTELIKAALVNVPTERLWVNPDCGLKTRGYAETEASLRNMVLARDLVVESL

SEQ ID NO: 89 - DNA, 1200 bp, Corynebacterium humireducens
  CDS (301)..(900): gene ptH1
gcgaacttggcgtcgaagtcgttcgacaggtcgacctccggcagggggcggtcgccggcgacacggcggacgtcggcaagcgactcgaagggcgcctgccgcgtgaacagattgacggcgtagggccccgtgacctgcgccagctgctcctccaggagcgcggcgggcgcgccgcccggcgcgaggaaaccgagggaaccggcggctgcggcggcgtcgacaagcgcgggcgacgaggggccgccggccatgggcgcgacgatgatctgcgggatgtccatgtgtgagagactatcgggcgtgttcaagatcttcgacctcttccgccgcaagcagacgaccccggcgctcagcgccgactggatcatcctcggcctgggcaacccggggccgaaatacgccgccacgcgccacaacgtgggctacatggccgtcgacgagcttctcgacgccaccccgctccagcccctccccggtacgaaggcactgcacgcgaagacgatgatcgcggggcaggacgtgctcgtgctgcgttcgacgacctacatgaacctctccggcgaggctgtcgccccactcgcggagcagctcggggtgccggcggagcggatcatcgccatccacgacgagctcgacctgccggtgggcaccgtgcgggtgaagaagggcggcaacgagaacggccacaacggcctgaagtccatgaccgagcacctgggcacccgcgactacctgcgggtgcgcatcggcatcgcccgcccgccgcagggcgtgtcggtgaccgaccatgtcctcggccccatcgacggcggcgagaacatccgcctggccgccgaggcggcgcggctcatcgtcgagcaggggctgggcagggcgcagaacgtcatccacgcgcggtgatcgcccccgggcgctgctgcaccaaagggggtattcgagtcggggcattgatcgggtgacgcccacgcgctacccgatcaatgcctcagttcgaataccccctcggccccggcggccccgcaggatctacttcgccatctgcgcgacgagcttctccaggtcgccgagcatcgtctccagctcgccgaggcgacgctcctgcggggagaacacgccctcctccgcgtcgttgaaggtcgacaggtacacctggttgcgcacgtcgtactgctggaagttgccgacgatctgccgccagct

SEQ ID NO: 90 - protein, 199 aa, Corynebacterium humireducens
VFKIFDLFRRKQTTPALSADWIILGLGNPGPKYAATRHNVGYMAVDELLDATPLQPLPGTKALHAKTMIAGQDVLVLRSTTYMNLSGEAVAPLAEQLGVPAERIIAIHDELDLPVGTVRVKKGGNENGHNGLKSMTEHLGTRDYLRVRIGIARPPQGVSVTDHVLGPIDGGENIRLAAEAARLIVEQGLGRAQNVIHAR

SEQ ID NO: 91 - DNA, 1146 bp, Corynebacterium humireducens
  CDS (301)..(846): gene ptH2
aggagatcgtcgtgtccgtcgagggcatcgaggccggcaacgtcatcaacgccggtgacatcaccctgccggaggacgtcaccctggtcgacgacgccgagctgctcgtcttcaacatcaccttcgaggaggtcgccgacgttccggaggagggcgaggaggccaccgaagacgctgtcggcgaggccggcaaggacgaggctgccgagggcgaggagtagtcactccccttccgccacgtgtgacgcccctgaccggccggtcaggggcgtctccccttttctgtgccagactgatcgggtgactgattctccacttctcatcgtcggcctgggtaacccgggcgcgaagtacgccgacacccgccacaacatcggcgtcatgcttctcgacgagctcgcctcccgcatcacccccgtccccgccagcttcgccgtgcacaagcgcacgaacaccgaggtcgccgaggtccgtcatcgcggccgtcgcctcgtgctggcccggacccgcggctacatgaacgtctccggtggaccggtgaaggcactggcgaccttcttcaggatcgcccccggcgacatcatcgtcgcccacgacgaactcgagctggacttcggcgagcaccgcctccgcaccggcggcggcgaccacggccacaacggcctgaagtccgtgaccaagtcgctgggaacgaaggagtaccagcgcctggcgctcggcatcggccgtccgcccgggcgtatggaccccgccgccttcgtgctcaagcccttcacccgccaggaggccggggagctgcccttcctgctctccgacgccgccgacgaactcgaacgcgccctctgacctcccagggtggaacctggtcccggaaggttccggacgctgcccgggtgtctagatggtgagctcctccggggccgcctccccctcgcgccgggcgatgatcttgtggatctggtactcccactcctgcagctcctccggcagctcccccttcgaggggtcacggagatactcgcgacgcccggcgtcgtagccccacagccagtcgacgtagcggtaccaggacgtgcggccggcctggcggaaggtctcgttgcggatcaggcgggagacgccgtcgacgtgccacagctcccccca

SEQ ID NO: 92 - protein, 181 aa, Corynebacterium humireducens
VTDSPLLIVGLGNPGAKYADTRHNIGVMLLDELASRITPVPASFAVHKRTNTEVAEVRHRGRRLVLARTRGYMNVSGGPVKALATFFRIAPGDIIVAHDELELDFGEHRLRTGGGDHGHNGLKSVTKSLGTKEYQRLALGIGRPPGRMDPAAFVLKPFTRQEAGELPFLLSDAADELERAL

SEQ ID NO: 93 - DNA, 1389 bp, Corynbacterium humireducens; identical to SEQ ID NO: 49
  CDS (301)..(1089): gene lplA

SEQ ID NO: 94 - protein, 262 aa, Corynbacterium humireducens; identical to SEQ ID NO: 50

SEQ ID NO: 95 - DNA, 2010 bp, Corynbacterium humireducens; identical to SEQ ID NO: 51
  CDS (301)..(1710): gene gcvL

SEQ ID NO: 96 - protein, 469 aa, Corynbacterium humireducens; identical to SEQ ID NO: 52

SEQ ID NO: 97 - DNA, 2442 bp, Corynebacterium humireducens
  CDS (301)..(2142): gene ilvB
cttgtggtagcagcgcggcgcctgccgtaacgaccctacccagtcgtctcgacaagcgccctcgacagcacccaccatcagtgctgtacgggggctttgtctttagatggtcgcaggtcacttgtgccgacgacagccaccaggccgaccccttccgcaccaagggaagagtcaccaggtagcgtttcaattgcattgtccttgtgaaattaggagcttgataacgtggcagcttcgcaaacgcccaccccggccacggtcgccaagaagtccccgggagccgagaacgcacccgagcggatgaccggcgcccaggcgatcgtccggtccctcgaggagctcggcaccgacatcgtcttcggcctgcccggcggtgccatcctccccctgtacgaccccctcttctcctcgaagaagctgcgtcacgtgctggtgcgccacgagcagggctcgggccacgctgccaccggttacgcacaggtcaccggcaaggtcggcgtctgcatcgccacctccggcccgggtgccaccaacctggtcaccccgctggccgacgccaacctggactccgtcccgatggtcgccattaccggccaggtcggccgttccctgctgggcaccgacgccttccaggaggccgacatccggggtgtgaccatgccgatcacgaagcacaacttcatggtcaccgaccccaacgacatcgcccgcaccctgatggaggccttccacctcgctctgaccggtcgcccgggccccgtcctggtcgacatcccgaaggacatccagaacgcggagttcgacttcgtctggccgccgaagatggatctgccgggctacaagccggtcaccacgccgcactcccgccagatcacccaggccgtccagatgatcgccgaggccgagcgtccctgcctctacgtcggcggcggcgtcatcaaggccgacgccaacaaggagctgctggagttcgccgagtacaccggcgtcccggtcgtcaccaccctcatggccctgggcgcgttcccggagtcccacccgctgcacatgggcatgccgggcatgcacggcgccgtcccggccgtcggtgccatgcagggcgctgacctgctcatcaccatcggcgcgcgtttcgacgaccgcgtcaccggcaacctcgacgagttcgccccggacgcccaggtcatccacgccgacatcgacccggccgagatcggcaagatccgcgaggccgccgtcccgatcgtcggcgacgcccgcgaggtcctctccgcactcctgcgcacctacaagtcctccaagaacctcaccccgccgaagatcaccgagtgggtcgagtacctgacggacctcaaggagcgcttcccgcgcggctacgacgagcagtcggacggcatgatgagcccgcagttcgtcatcgagaccctgtccaaggaggtcggcccggacgcgatctacgtcgccggcgtcggccagcaccagatgtgggccgcgcagttcatcgacttcgagaagccgcgcacctggctcaactccggtggtctgggcacgatgggctactccatccccgccgccatgggcgccaaggccggtctgccggacgccgaggtctgggccatcgacggtgacggctgcttccagatgaccaaccaggagctcaccaccgccgcggtcgagggcttcccgatcaaggtcgccctgatcaacaacggcaacctgggcatggtccgccagtggcagaccctgttctacggtggccgctactcgaacacgaagctgcgtgagcaggacgagtacgtgccggacttcgtcacgctgtccgaggcgctcggctgcgtcgccttccgcgtcacccgcgaggaggacgtcctgccgacgatccagaaggcacgcgagatcaacgaccgcccggtcgtcatcgacttcatcgtcggtgaggacgcccaggtctggccgatggtcgccgccggcgcctccaactcggacatcgagtacgcacgtggtctgcgccccttcttcgagggtgacgagtccgcgggtgagtccccggccgacatccacggtgtcatggagaacgcccaggaggagaccgtcgaggaagtcctcgaggagcgcgcgaacgacagcgagaaggagaactaggacaatggcgaacaccgacatcatccgcaacaccctcagcgtcctggtccaggacgtcgacggcatcatctcccgcgtcgcaggcatgttcacccgccgtggctacaacctggtgtccatcgtctcggcgcacaccgacaccccgggcatcagccgcatcaccatcgtggtcgacgccaacgagctggtcatcgagcaggtcaccaagcagctcaacaagatcatcccggtgctcaaggtcgtccgcctcgaggaggacaccaccatcgcccgcgccatcatgctggtgaaggtcaacgc

SEQ ID NO: 98 - protein, 613 aa, Corynebacterium humireducens
MTGAQAIVRSLEELGTDIVFGLPGGAILPLYDPLFSSKKLRHVLVRHEQGSGHAATGYAQVTGKVGVCIATSGPGATNLVTPLADANLDSVPMVAITGQVGRSLLGTDAFQEADIRGVTMPITKHNFMVTDPNDIARTLMEAFHLALTGRPGPVLVDIPKDIQNAEFDFVWPPKMDLPGYKPVTTPHSRQITQAVQMIAEAERPCLYVGGGVIKADANKELLEFAEYTGVPVVTTLMALGAFPESHPLHMGMPGMHGAVPAVGAMQGADLLITIGARFDDRVTGNLDEFAPDAQVIHADIDPAEIGKIREAAVPIVGDAREVLSALLRTYKSSKNLTPPKITEWVEYLTDLKERFPRGYDEQSDGMMSPQFVIETLSKEVGPDAIYVAGVGQHQMWAAQFIDFEKPRTWLNSGGLGTMGYSIPAAMGAKAGLPDAEVWAIDGDGCFQMTNQELTTAAVEGFPIKVALINNGNLGMVRQWQTLFYGGRYSNTKLREQDEYVPDFVTLSEALGCVAFRVTREEDVLPTIQKAREINDRPVVIDFIVGEDAQVWPMVAAGASNSDIEYARGLRPFFEGDESAGESPADIHGVMENAQEETVEEVLEERANDSEKEN

SEQ ID NO: 99 - DNA, 1614 bp, Corynebacterium humireducens
  CDS (301)..(1314): gene ilvC
ccgcgcccgcatcgtcgacgtggcccaggagtccgtggtcatcgaggccaccggtaccccgggcaagctgcgcgccctgctggaggtcctcgagcccttcggtatccgtgagctcatccagtccggtcagatcgccctcaaccgcggtccgaagacgatggcaccgtccaagtaacaccccctcatcccacctggtgagacaacacgcatgaaagtcccaccaggtggggtacccctgtctcatgttgtggtacaaacaacaacagcacttgtataagacgaaaggcgagtttttctcccatggctattgaactgctttacgacgccgacgctgacctctccctcatccagggccgcaaggtcgccatcatcggctacggctcccagggccacgcccacgcccagaacctgcgtgactccggcgtcgaggtctgcatcggcctgcgcgacggctccaagtccgcggagaaggccaaggaggccggcttcgaggtcaagtccaacgccgacgccgccgcctgggcagacgtcatcatgctgctcgccccggacacctcccagaagtccatctacgagaacgacatcgagccgaacctcaacgacggtgacgccctgctgttcggccacggcctgaacgtccacttcggcctgatcaagccggccgagaacatcgtcgtcggcatggtcgccccgaagggcccgggccacctcgtccgtcgtcagttcgtcgacggcaagggcgtcccctgcctcatcgccgtcgaccaggacccgaagggcaacggcaaggacctgctgctgtcctacgccgccgccatcggtggtgcccgtgcaggcgtcatcccgaccaccttcgaggctgagaccgtcaccgacctgttcggtgagcaggccgtcctctgcggtggcaccgaggagctcgtcaagaccggcttcgaggttctggtcgaggctggctacgagccggagatggcctacttcgagtgcctccacgagctcaagctgatcgttgacctcatgttcgagggcggcatcgccaacatgaactactccgtctccgacaccgccgagttcggtggctacctctccggcccgcgcgtcatcgacgccggcaccaaggagcgcatgaaggacatcctgaccgacatccaggacggcaccttcaccaagcgcctcatcgccaacgtcgagaacggcaacaaggagctcgagggtctgcgcgaggagtacgccaagcaccagatcgaggagaccggcgccaagctgcgtgacctcatgagctgggtcaaggtcgagatcaccgagaccgcctaagcccccacgcttgtcgacgccccaccggttcgccggtggggcgttcgtctttgccgggccagctgaggggcctgcctcaggggtggagcaggtcgagcaggtgccgccggagggcggggtcggggtcggcgtcgcgacgcgggcgggggaggtccacggtgatgtcggcgatgaccgtggcgtcgggggagggggacatgacgaggatgcggtcggagagcaggatcgcctcgtcgacgtcgtgggtgaccatgacgacggtgcggcggtcggactcccacagggagagcagctccagct

SEQ ID NO: 100 - protein, 337 aa, Corynebacterium humireducens
MAIELLYDADADLSLIQGRKVAIIGYGSQGHAHAQNLRDSGVEVCIGLRDGSKSAEKAKEAGFEVKSNADAAAWADVIMLLAPDTSQKSIYENDIEPNLNDGDALLFGHGLNVHFGLIKPAENIVVGMVAPKGPGHLVRRQFVDGKGVPCLIAVDQDPKGNGKDLLLSYAAAIGGARAGVIPTTFEAETVTDLFGEQAVLCGGTEELVKTGFEVLVEAGYEPEMAYFECLHELKLIVDLMFEGGIANMNYSVSDTAEFGGYLSGPRVIDAGTKERMKDILTDIQDGTFTKRLIANVENGNKELEGLREEYAKHQIEETGAKLRDLMSWVKVEITETA

SEQ ID NO: 101 - DNA, 2439 bp, Corynebacterium humireducens
  CDS (301)..(2139): gene ilvD
gaggacgtctccggcatcggcttcaagggctcccgcgccctgctgaccacccgcgacggcaccgagcacgccatgcccggcgtgaccttcaactccctgccgcagctggcggaggcctcccagggccggatccccgatgtcctcacctccgcccaggaggcggccgacgacaaggtcaccatcatccaccgcgacgggcagcagatcctcatctccaaggaggagtacgctgctcgacaggccgcgcagcaggccaaccgctcgtcctctgacaaccctgaaaacctgaaggagcagtaagtgttcccgcttcgatccaaagtcaccaccgtcggacgcaacgccgccggagcccgcgccctgtggcgcgccacgggcaccaaggagcacgagttcggtaagccgatcgtcgcgatcgtgaactcctacacccagttcgtcccgggccacgtccacctgaagaacgtgggcgacatcgtcgcggacgccgtccgtgccgccggtggcgtgccgaaggagttccacaccatcgccgtcgacgacggcatcgccatgggacacggcggcatgctctactcgctgcccagccgtgagatcatcgccgactctgtcgagtacatggtcaacgcccacaccgccgacgcgatggtctgcatctccaactgcgacaagatcaccccgggcatgctcaacgccgcgctgcgtctcaacatcccggccgtgttcgtctccggcggtccgatggaggccggcaaggccgtcgtcgtcgacggcgtcgcccagaccccgaccgacctcatcaccgccatcgccgcctccgccgacgacaacgtctccgatgagggcctggccaccatcgaggagtcggcctgcccgacctgtggctcctgctccggcatgttcaccgccaactcgatgaactgcctcaccgaggccctgggcctgtccctgccgggcaacggcacgacgctggccacccactccgcccgccgtcgtctcttcgagcaggccggcgagaccatcgtcgagctgtgcaggcgctactacggcgaggaggacgagtccgtcctgccgcgcaacatcgccaccaaggacgccttccgcaacgcgatggccctcgacatggccatgggcggctccaccaacacgatcctccacacgctggccgccgcccaggagggtgaggtcgacttcaccctggcggacatcgaggagatctcccaccaggtgccgtgcatctccaaggtcgccccgaacggcatctaccacatcgaggacgtccaccgcgccggcggcatcccggccatcctcggcgagctgcgtcgcgcgaacctgctcaacgaggacgtccactccatcacctacgactccctcgacgagtggctgggtgactgggacatccgtggcggccgggccatcgacgccgcgaccgagctcttccacgccgccccgggtggcgtgcgcaccacggagcccttctccaccgacaaccgctgggacagcctggacaccgacccggtcaacggctgcatccacgacgtcgagcacgcccactccgcggacggcggcctggtggtcctgcgcggcaacctggcgccggacggctccgtcctcaagaccgccggcgtcgaggaggagctgtggaccttcaccggcccggcccgcgtcgtcgacagccaggaggaggccgtctccatcatcctcaagcgcgaggtccagccgggtgaggtcgtcgtcatccgttacgagggtccttccggtggcccgggcatgcaggagatgctgcacccgacgtccttcctcaagggtgccggcctgggcaagaagtgcgccctcatcaccgacggccgtttctccggcggcacctccggcttgtcgatcggccacatctccccggaggccgcccacggtggtctcatcggcctgatccgcaacggtgacccgatcaccatcgacgtccacacccgtcgtctctccctcgacctgccggacgaggagatcgaggcccgccgcgccgagatggaggcctccgagaagccgtggaccgcgaaccgcgagcgcaaggtctccaaggcactgcgtgcgtacgccgccatggccacctccgccgataagggcgccgtccgccaggtggactaacattgtccgcgtgaccacgacaaacaagcccgcgatcctgccccacaccgccatcctgaggatggtggtggccctggggctgatcgcgggcttcggcgtcaccggacgccagatgatgatcaccgacttccccatcgacatgatcatctacatggagggcgtgcgggccttcctcgacggcgccgagatgtacgccgtgccgatgtacgccggctccctggccctgccgttcatctatcccccgttcggcgccctcgtcatggtgccgctcacccgttacgagcatgacctggccggcga

SEQ ID NO: 102 - protein, 612 aa, Corynebacterium humireducens
VFPLRSKVTTVGRNAAGARALWRATGTKEHEFGKPIVAIVNSYTQFVPGHVHLKNVGDIVADAVRAAGGVPKEFHTIAVDDGIAMGHGGMLYSLPSREIIADSVEYMVNAHTADAMVCISNCDKITPGMLNAALRLNIPAVFVSGGPMEAGKAVVVDGVAQTPTDLITAIAASADDNVSDEGLATIEESACPTCGSCSGMFTANSMNCLTEALGLSLPGNGTTLATHSARRRLFEQAGETIVELCRRYYGEEDESVLPRNIATKDAFRNAMALDMAMGGSTNTILHTLAAAQEGEVDFTLADIEEISHQVPCISKVAPNGIYHIEDVHRAGGIPAILGELRRANLLNEDVHSITYDSLDEWLGDWDIRGGRAIDAATELFHAAPGGVRTTEPFSTDNRWDSLDTDPVNGCIHDVEHAHSADGGLVVLRGNLAPDGSVLKTAGVEEELWTFTGPARVVDSQEEAVSIILKREVQPGEVVVIRYEGPSGGPGMQEMLHPTSFLKGAGLGKKCALITDGRFSGGTSGLSIGHISPEAAHGGLIGLIRNGDPITIDVHTRRLSLDLPDEEIEARRAEMEASEKPWTANRERKVSKALRAYAAMATSADKGAVRQVD

SEQ ID NO: 103 - DNA, 1725 bp, Corynebacterium humireducens; identical to SEQ ID NO: 29
  CDS (301)..(1425): gene ilvE

SEQ ID NO: 104 - protein, 374 aa, Corynebacterium humireducens; identical to SEQ ID NO: 30

SEQ ID NO: 105 - DNA, 1896 bp, Corynebacterium humireducens
  CDS (301)..(1596): gene ilvA
gccgatcggggccagcgagagggccgcacccggggccgagtggacgacggggttgtccacgacagcggcgtgggccggggcgatgagggagacactggtggcgagcgccgcgcacagcgcgacagcggaacggcgaagggacacggggagaactcctgtggtcggtggggtgcagatcgtgtgacatggtggaccagtgacatgacaccaatctcaattccggaccacctgcaggtgaacagtcggtgaagtgggctgcaacgccgtggccggtggacagggggactacactgagtccccatgagtgacacccggtctgccgtaaccaccttcgagcctgtccgcgcctcggacattcagctggcgcaggcacggatctcctccgtcatcgagcccaccccgctccagtactgcccccgcctctccgaggagaccggctgcgaggtgtacctcaaacgcgaggacctgcaggacgtgcgctcctacaagatccgcggcgcctactacgccatggccaacctcgacgagcagcagcgggacgccggcatcgtcgccgcctccgccggcaaccacgcacagggtgtcgcctacgcctgccgcacgatgggcatccggggtcgcatcttcgtccccaaccagacgccgaagcagaagcgtgaccgcatcatggtccacggcggtgacatggtggagctggtcgtcaccggcaacaacttcgacgaggccgccgaggccgcgcgtgccgacgccgccgagcgcggcgccaccatgatcgagcccttcgacgcccgcgacaccgtcatcggtcaggggaccatcgcggcggagatcctcacgcagctcacgtccatcggcaagtccctcgacacggtgctcgtgccggtcggcggcggtggcctcctggccggtgtcgccagctacctcgccgacatggcgccgcgcaccgcgatcgtcggcgtcgagccgggcggtgccgcctccctccaggccgccctgcgtgccgacgcccccgtcaccctctccgcggtcgaccccttcgtcgacggcgccgccgtcaagcgcatcggtgacctgcccttcgacatcatcgaacgcaacaagggccgcatccacgtcatggacgtctccgagggcgccgtgtgcaccgagatgctcgacctgtaccagaacgagggcatcatcaccgagcccgccggtgcactgtcggtcacgggcctgaaggagatgaagctccagcaggactccatcgtggtgtgcatcatctccggcggcaacaacgacgtgctgcgctacgccgagatcatggagcgctccctggtgcaccgcggcctcaagcactacttcctggtgaacttcccgcaggagccgggccagctgcgccacttcctcaacgacatcctcggccccgacgacgacatcaccctcttcgagtacctcaagcgcaacaaccgggagaccggtgccgcgctcgtcggcctcgagctcggccgggccagcgacctcgacccgctgctcgagcggatgaacgcctcccgcatcgagtgccagcacctcaagccgaacacccccgagtacgagtacctggtcaacacctaggggtctctacctgcgcaggagcgcgaactcccacgggcccaggcgcgtgtcgtcgaggccgacctccggttccgtgaaggagtagatgagctcgccgccgtagggggcgcggacctccgcgtcggagaggttggccacgaggatcacgtcctcccagcccatcgccagccagccgtccccggtctcgacggtgaggcgggagagatcggcgcgggagaggccgagctcgcggcgcagacgcagcagctcccggtaggcggcgtggatctcctgctgctcctccgtgaagtcccagtccag

SEQ ID NO: 106 - protein, 431 aa, Corynebacterium humireducens
MSDTRSAVTTFEPVRASDIQLAQARISSVIEPTPLQYCPRLSEETGCEVYLKREDLQDVRSYKIRGAYYAMANLDEQQRDAGIVAASAGNHAQGVAYACRTMGIRGRIFVPNQTPKQKRDRIMVHGGDMVELVVTGNNFDEAAEAARADAAERGATMIEPFDARDTVIGQGTIAAEILTQLTSIGKSLDTVLVPVGGGGLLAGVASYLADMAPRTAIVGVEPGGAASLQAALRADAPVTLSAVDPFVDGAAVKRIGDLPFDIIERNKGRIHVMDVSEGAVCTEMLDLYQNEGIITEPAGALSVTGLKEMKLQQDSIVVCIISGGNNDVLRYAEIMERSLVHRGLKHYFLVNFPQEPGQLRHFLNDILGPDDDITLFEYLKRNNRETGAALVGLELGRASDLDPLLERMNASRIECQHLKPNTPEYEYLVNT

SEQ ID NO: 107 - DNA, 2043 bp, Corynebacterium humireducens
  CDS (301)..(1743): gene thrC
cggggcagcaccgcgatggccacgacgaggacgagcaggaccgcggtgacggtggctacggtacgtgtgttacctcgggaggccacggggcgctcactcctctgtgcgactctctgcgactctgtacgactctgtgcgacgcggcgtggacaacgccgcccggcaggggcgtgcggccgcagtaccccgtagcgtactcaactgcttttcccgggaaaggggaattcaccgggatccccgccccggcgtgcgggtgggatgttgcgcatgcttccagccccgccacgtatggttgtccacgtggattacatttcgacgcgcgactcctcccgtactcccgccaccttcaccgacatcctgctcggtggactggcccccgacggcggcctctacctgcccgccgagtacccgcagatcagcgatgagcagctgacgcagtggcggtctctcctgcaggagaaggggtacgccgccctggcggcggagatcctcaagctcttcgtcgacgacatcccggcggaggatctcgagggcatcgccgcccgcgcctacacctccccgaagttcgcgcacgaggagatcgtccccgtgaccgagctcgaggacggcctgtggatcggccacctctccgagggcccgaccgccgcgttcaaggacatggcgatgcagctgctcggcgagctcttcgagtacgagctggcccgtcgcggggagaccctcaacatcctgggtgcgacctcgggtgacacgggttcctccgccgagtacgcgatgcgcggccgtaagggcatccgtgtcttcatgctgaccccggccggtcgcatgaccccgttccagcaggcgcagatgttcggcctgcaggaccccaacatcttcaacatcgccctggacggcgtcttcgacgactgccaggacgtggtcaaggcggtgtccgccgacgccgggttcaaggccgagaaccgtatcggtgcggtcaactcgatcaactgggcccgcctcatggcgcagatcgtctactacgtctcctcctggctgaggatcaccgagagcaacgaccagaaggtctccttctccgtgccgaccggcaacttcggtgacatctgcgccggccacatcgcccgtcagatgggtctgccgatcgaccgtctcatcgtcgccaccaacgagaacgacgtcctcgacgagttcttccgcaccggcaactaccgtccgcgcccggcggaggagaccctggagacgtcctcgccgtcgatggacatctcccgtgcctccaacttcgagcgtttcgtcttcgacctgctgggccgtgacgccgcgcgcgtcgcgcagcacttcggcgtcgacgtccgcgccgacggtttctcgcttgccgacgaccccgcgttcccggccgccgcagagaagtacggcttcgcctccggtcgttccacccaccaggaccgcctcgacacgatcagggacgtgtgggagcgcctgggcatcatgctcgacccgcacaccgccgacggcgtgaaggtcgcccgcgagtggcgttccgagatcgacggcccgatcgtgtgcctggagaccgccctgccggtgaagttctccgagaccatcgaggaggccaccggcgtgcagccggagaccccggagcgtttcgccggcatcctcgacgccgagcgccacgtgacggacctgccgaacgacgcggagaccgtcaagaagttcatcaccgactccatccgcaccaccgaggtgtaaccgtcgtggccatggagttcaagatgggtcaggagtacttccaggacttcgacccggagaagttcgccgcgatgatcaaggcgcaggccgaggctgaggctgacgctgcggccggggaagacggcgtcgacaagcagtgaacatccgcgtctgggcgggtctggtcgcactgaccaccgccggcgtggggtcgctcatcgcctggtccgtcgaggaccagcggcagcaccccacgcccatcgccgaggtgatcgcggcggcgccgacgcaggtcccgacggagttccgtgcccctgcggt

SEQ ID NO: 108 - protein, 480 aa, Corynebacterium humireducens
VDYISTRDSSRTPATFTDILLGGLAPDGGLYLPAEYPQISDEQLTQWRSLLQEKGYAALAAEILKLFVDDIPAEDLEGIAARAYTSPKFAHEEIVPVTELEDGLWIGHLSEGPTAAFKDMAMQLLGELFEYELARRGETLNILGATSGDTGSSAEYAMRGRKGIRVFMLTPAGRMTPFQQAQMFGLQDPNIFNIALDGVFDDCQDVVKAVSADAGFKAENRIGAVNSINWARLMAQIVYYVSSWLRITESNDQKVSFSVPTGNFGDICAGHIARQMGLPIDRLIVATNENDVLDEFFRTGNYRPRPAEETLETSSPSMDISRASNFERFVFDLLGRDAARVAQHFGVDVRADGFSLADDPAFPAAAEKYGFASGRSTHQDRLDTIRDVWERLGIMLDPHTADGVKVAREWRSEIDGPIVCLETALPVKFSETIEEATGVQPETPERFAGILDAERHVTDLPNDAETVKKFITDSIRTTEV

SEQ ID NO: 109 - DNA, 2448 bp, Corynebacterium humireducens
  CDS (301)..(2148): gene leuA
gggtcgatgccgtggagcagggcttttcacgtttcttcacaaaactgcgttgcgccgggggagggagtgtgtagacttcacagcatgttctcccgcgcgaacctccttcttcttcgccgcggcgggtcccaggtccagtaacgaagcgaccggcaccccgtcgcggagtttggtgttgccggtcgctgctcccgctgaatagcccattcatcagcggtgagacctcgcaggctactacagtgaaggccgttgtcggcccctggtagtccgcagccacagacagacccgaaaaggaaactcatgtccccgaacgactccttcatctccgccccctccgagatccgcaccccggacggaccgcgccgcgagggccagcccttctggaacaagcagcgcaactcctccatgccggtacaccgctaccgccccttcgccgaggccgtcgaggacatcgttctgccggaccgcacctggccggacaagaagatcaccgccgccccgcagtggtgtgcggtcgacctgcgtgacggcaaccaggcgctcatcgacccgatgagcccggaacgcaagcgccgcatgttcaacctgctggtgcagatgggctacaaggagatcgaggttggtttcccgtccgcctcccagaccgacttcgacttcgtccgcgagatcatcgagcaggacatgatcccggaggacgtcaccatccaggtcctggtccaggcccgtgagcacctgatccgccgcaccttcgaggcgtgcgagggcgcgaagaacgtcatcgtccacttctacaactccacctccgagctgcagcgccgcgtcgtgttccgcaaggataagccggccatcaagcagctggccgtcgacgccgccgagctgatccagaccatcgcccaggactacccgggcaccaactggcgttggcagtactccccggagtccttcaccggcaccgagctggagttcgccctcgaggtctgcaacgccgtcatcgaggtcatggcgcccaccccggacaacccgatcaacatcaacctgccgtccaccgtcgagatgatcaccccgaacgtctacgccgactccatcgagtggatgcaccgcaacctggaccgccgtgactccgtcatcctgtcgctgcacccccacaacgaccgtggtgagggcgtcgccgccgccgagctgggctacctggccggcgccgaccgcatcgagggctgcctgttcggcaacggtgagcgcaccggtaacgtctgcctggtcaccctgggcctgaacatgctcacccagggcgtcgacccgcagatcgacttctccgacatccgccagatccgcagcaccgtcgagtactgcaaccagctgcgagtcccggagcgtcacccctacggcggcgacctggtcttcaccgccttctccggctcccaccaggacgccgtcaacaagggcctcgacgccatggccgccaaggtcaagccgggcgccaacaacaccgaggtcacctgggaggagctgggcaaggccgtctgggaggttccctacctgcccatcgacccgaaggacgtcggccgcgactacgaggccgtcatccgcgtcaactcccagtccggtaagggcggcgtcgcctacatcatgaagacggatcacggcatcaacctgccgcgtcagatgcaggccgagttctcctccgtcgtccaggcgatcaccgactccgagggcggagaggtcaactccaaggagatgtgggacgtcttcgccaccgagtacctggatgtcaccgagccggtggaggaggtctccatccgcatcgtcaacgccgagaccgacaccgacgaggccaccgtcaccgccaccgtcatccacaagggctccgagaaggagatcaccggcaccggcaacggccccgtcgccgcctacgccaacgccctggagcagctgggcatcgacgcggaggtccagttctactcccagcaggcccgctcctcgggcgatgacgccgaggccgcctgctacatctacgccacggtcaacggctccgccgcctggggcgtcggtatcgcgggctccatcacccgcgcctccatcaaggcactgacctccgcggtcaaccgtgccatcaaggtcgaggcctccgtgctggccggcggcgtctagaccgcctgagtcacgggaggggagtgcgcggccgcgcactcccctccttccgtatctcaccgcccctaccggcccctaccagcacagtccccgcaggagaggcactagactctgaacaatgaccacgaccccagaccacggcgattccgcagctgagaccccgcctgccgtcgagccggcgttccccttcgtcgctctgacggtccaggccacggggatccatccgtcgaccgcccgcctggtggccgtcgacgtcctgaccttcgacgaggacggggagatcggcgaggagttccacac

SEQ ID NO: 110 - protein, 615 aa, Corynebacterium humireducens
MSPNDSFISAPSEIRTPDGPRREGQPFWNKQRNSSMPVHRYRPFAEAVEDIVLPDRTWPDKKITAAPQWCAVDLRDGNQALIDPMSPERKRRMFNLLVQMGYKEIEVGFPSASQTDFDFVREIIEQDMIPEDVTIQVLVQAREHLIRRTFEACEGAKNVIVHFYNSTSELQRRVVFRKDKPAIKQLAVDAAELIQTIAQDYPGTNWRWQYSPESFTGTELEFALEVCNAVIEVMAPTPDNPININLPSTVEMITPNVYADSIEWMHRNLDRRDSVILSLHPHNDRGEGVAAAELGYLAGADRIEGCLFGNGERTGNVCLVTLGLNMLTQGVDPQIDFSDIRQIRSTVEYCNQLRVPERHPYGGDLVFTAFSGSHQDAVNKGLDAMAAKVKPGANNTEVTWEELGKAVWEVPYLPIDPKDVGRDYEAVIRVNSQSGKGGVAYIMKTDHGINLPRQMQAEFSSVVQAITDSEGGEVNSKEMWDVFATEYLDVTEPVEEVSIRIVNAETDTDEATVTATVIHKGSEKEITGTGNGPVAAYANALEQLGIDAEVQFYSQQARSSGDDAEAACYIYATVNGSAAWGVGIAGSITRASIKALTSAVNRAIKVEASVLAGGV

SEQ ID NO: 111 - DNA, 1614 bp, Corynebacterium humireducens
  CDS (301)..(1314): gene leuB
ctggtcgtagtactcgtagtcatagacgcggacgtcgtcgccgagcgcggccgccttctccggggaaccggtgacggcggcgacgagctcgacgtcgtcgagactgcggagcgccgggaggaaggcctgctgggtgatctggccgacaccgacgacagcgaaacggacaggggagtcatatgcgtgtgtgctcatggccccaggctacggactcgaaacgtgcggcgttgagcgcacgaggggaggggtgggctgatagaatcgccgccagttcagcaggtgagaaaggaatcccacagaatgaaacttgcagtcattggcggagacggcatcggcccggaggtcaccgaagaggcgctcaaggtcctccgcaccgtccgcgacgacatcgagaccaccgactacgatctcggcgcacgtcgctacctgcgcaacggtgagctgctcaccgacgccgacctcgactccctccgcgagcacgacgccatcctcctcggcgccatcggcgccccggacaccgtcgcgccgggcgtcctcgagcgtggcctgctgctcaagatgcgtttcgccctcgaccaccacgtcaacctgcgtccctccaagctctacgagggcgtcgagtccccgctgaagaacccgggcgagatcgacttcgtcgtcgtccgcgagggcaccgagggcgcctacaccggcaacggcggcgccatccgcgtgggcaccccgcacgaggtcgccaacgagacctccgtcaacacccgctacggcgccgagcgcgtcgtccgctacgccttcgagctggccatgacccgccgcaagcacgtcaccctggtccacaagaccaacgtgctcgtccacggcggcggcatgtggcagcgcaccgtcgacgaggtcgccacggagtaccctgaggtcaccgtcgactacgcgcacatcgacgccgcgacgatctacatgatcaccgacccctcccgcttcgacgtcatcgtcaccgacaacctcttcggcgacatcatcaccgatgaggccggtgccgtctccggtggcatcggcctcgccgcctccggcaacatcgacgccacccgcaccaacccgtccatgttcgagccggtccacggctccgcaccggacatcgccggccagggcatcgccgacccgaccgccgccatcctctccgccgcgatgctgctgcgtcacctcggtgacgaggacaacgccgcacggatcgaggccgcggtggccgaggacgtcgccaagcgtgaggggcagatccgcaccaccgaggtcggcgaccgcatcgccgccgccctcaagtagtctgtcggcagcagacagacgccatatatataaggagcattcgtgaggcgacgtacagcactactggccctggccaccaccctggccatggtcaccggatgctccacctcggcggacaccggtgacggggacgaccggaagcccggcacccccgccctggagatgacctcctccgaggtcatcgccgacgccgccggcaacggcgtcgacacctccgcccgcctcttcgaggaggcggagaccgtcgtggtcgccgccgacacccctgaggaccaggcccggggcgcccacctggcgatc

SEQ ID NO: 112 - protein, 337 aa, Corynebacterium humireducens
MKLAVIGGDGIGPEVTEEALKVLRTVRDDIETTDYDLGARRYLRNGELLTDADLDSLREHDAILLGAIGAPDTVAPGVLERGLLLKMRFALDHHVNLRPSKLYEGVESPLKNPGEIDFVVVREGTEGAYTGNGGAIRVGTPHEVANETSVNTRYGAERVVRYAFELAMTRRKHVTLVHKTNVLVHGGGMWQRTVDEVATEYPEVTVDYAHIDAATIYMITDPSRFDVIVTDNLFGDIITDEAGAVSGGIGLAASGNIDATRTNPSMFEPVHGSAPDIAGQGIADPTAAILSAAMLLRHLGDEDNAARIEAAVAEDVAKREGQIRTTEVGDRIAAALK

SEQ ID NO: 113 - DNA, 2019 bp, Corynebacterium humireducens
  CDS (301)..(1719): gene leuC
gctggtcccggccgccggtgccgagggcggtgagtgcggtgccggtggtccagcggccgtcgtcgccgcgggcgaggatgcggtgtgtctcgagggcggtggcgaggcggtgggcggtggcgcggggcaggccggtggtctcgcacagttcggtgagggagaggggatggggggcgacggccatcatgatggcgacggcccgatcgagcaccttgatccctgacactgcgctatactgtcccataccacgatactaacatctcaccttgtgagatttcacagatggaaaggtggacatccatggccgagaagctcacgctggccgagaaggtgtggaacgaccatattgtcgcgaagggcgagaacggcgagcccgatctcctctacattgacctgcagctcctgcacgaggtgacctccccgcaggccttcgacggactgcgcctcgccggccgcaagctccgccgcccggacctgcacctggccaccgaggaccacaacgtgcccaccgagggcatcgtctccggctccctcctggagatcaaggaggccacctcccgcacgcaggtcgagaccctgcgcaagaactgcgaggagttcggcatccgcctgcacccgatgggcgacgtcaagcagggcatcgtccacaccgtcggcccgcagctgggcgccacccagccgggcatgaccatcgtctgcggcgactcccacacctccacccacggtgccttcggctccatcgccatgggcatcggcacctccgaggtcgagcacgtcatggcgacccagaccctgccgctcaagccgttcaagaccatggccatcgaggtctccggcgagctgcaggagggcgtcaccgccaaggacctcatcttggcgatcatcgccaagatcggcaccggcggcggccagggccacatcatcgagtaccgcggcgaggccatcgagaagctctcgatggaggcccggatgaccatctgcaacatgtccatcgaggccggtgcccgtgccggcatggtcgcccccgaccagaagaccttcgactacgtccagggccgcgagttcgcccccaccggcgaggactgggacgccgccgtcgcctactggaagaccctgccgaccgacgagggcgccgagttcgacaccgtcgtcgagatcgacggctccgcgctgaccccgttcgtcacctggggcaccaacccgggccagggcctgcccctgtccgcgaacgtcccggacccggaggacttcaccaacgaggccgacaaggccgccgcggagaaggccctggcctacatggacctcaccccgggcaccccgctgcgggacatcaagatcgacaccgtcttcctcggctcctgcaccaacgcccgcatcgaggacctgcgcgctgccgccgaggtcgtcgagggccgcacgatcgccccgaacacccgcatgctcgtcgtcccgtcctcgacgctggtcaagcagcaggccgaggaggaggggctggacaagatcttcaccgacttcggcgccgagtggcgcaccgccggctgctccatgtgcctgggcatgaacccggaccagctggccccgggcgagcgctccgcctccacctcgaaccgtaacttcgagggccggcagggcccgggcggccgcacccacctggtgtccccgccggtcgccgccgccaccgccgtcctcggccacctggcttcccccgcagacctctgaccacgccgaccaccaaggagataaaaacagtggagaagttcaccacccacaccggcgtcggcgtcccgctgacccgctcgaacgtcgacaccgaccagatcatccccgccgtctacctcaagcgcgtcacccgcacgggcttcgatgacggcctgttcgccgagtggcgcaaggacgattccttcgtcctcaaccaggagccctaccgcaacggctccgtcctggtcgccggccccgacttcggcaccggctcctcccgtgagcacgccgtctgggccctcatggactacggcttccgcg

SEQ ID NO: 114 - protein, 472 aa, Corynebacterium humireducens
MAEKLTLAEKVWNDHIVAKGENGEPDLLYIDLQLLHEVTSPQAFDGLRLAGRKLRRPDLHLATEDHNVPTEGIVSGSLLEIKEATSRTQVETLRKNCEEFGIRLHPMGDVKQGIVHTVGPQLGATQPGMTIVCGDSHTSTHGAFGSIAMGIGTSEVEHVMATQTLPLKPFKTMAIEVSGELQEGVTAKDLILAIIAKIGTGGGQGHIIEYRGEAIEKLSMEARMTICNMSIEAGARAGMVAPDQKTFDYVQGREFAPTGEDWDAAVAYWKTLPTDEGAEFDTVVEIDGSALTPFVTWGTNPGQGLPLSANVPDPEDFTNEADKAAAEKALAYMDLTPGTPLRDIKIDTVFLGSCTNARIEDLRAAAEVVEGRTIAPNTRMLVVPSSTLVKQQAEEEGLDKIFTDFGAEWRTAGCSMCLGMNPDQLAPGERSASTSNRNFEGRQGPGGRTHLVSPPVAAATAVLGHLASPADL

SEQ ID NO: 115 - DNA, 1197 bp, Corynebacterium humireducens
  CDS (301)..(897): gene leuD
cccgtcctcgacgctggtcaagcagcaggccgaggaggaggggctggacaagatcttcaccgacttcggcgccgagtggcgcaccgccggctgctccatgtgcctgggcatgaacccggaccagctggccccgggcgagcgctccgcctccacctcgaaccgtaacttcgagggccggcagggcccgggcggccgcacccacctggtgtccccgccggtcgccgccgccaccgccgtcctcggccacctggcttcccccgcagacctctgaccacgccgaccaccaaggagataaaaacagtggagaagttcaccacccacaccggcgtcggcgtcccgctgacccgctcgaacgtcgacaccgaccagatcatccccgccgtctacctcaagcgcgtcacccgcacgggcttcgatgacggcctgttcgccgagtggcgcaaggacgattccttcgtcctcaaccaggagccctaccgcaacggctccgtcctggtcgccggccccgacttcggcaccggctcctcccgtgagcacgccgtctgggccctcatggactacggcttccgcgtcgtgctgtcctcccgcttcgccgacatcttccgcggcaactccggcaaggccggcctgctggccgcccagatggaggaggccgatatcgagctgctgtggaagcagctcgaggctgagccgggcctggagatcaccgtcgacctcgagtcccgcaccgtcaccgccggcgagaacacctaccagttctccgtcgacgactacacccgctggcgcctcatggagggcctcgacgacatcggcctgaccctgcgcgacgagcaggccatcaccgactacgaggcgaagcgccccgtgtacaagccgaccatcaccgcggaggtgtgagtcatgtccgacaaccgtttcgacgagggaatccgcatccgccgcgaggtcatgggcgacgatttcgtcgacgccgccctgacccgcaacgccggcaccgacggcgaggacctgcagcaccacatcaccgccaccgtctggggttcggtgtggacccgcgagggcctgtccaagcgtgaccgcagcctgctcaacatcggcatgctcgtcgccctgcgcgcgaccgaggaactgcgcggacatgtccgcggcggcctgcgtaacggcctgacccgcgaggagatcaccgaggcgatcatc

SEQ ID NO: 116 - protein, 198 aa, Corynebacterium humireducens
VEKFTTHTGVGVPLTRSNVDTDQIIPAVYLKRVTRTGFDDGLFAEWRKDDSFVLNQEPYRNGSVLVAGPDFGTGSSREHAVWALMDYGFRVVLSSRFADIFRGNSGKAGLLAAQMEEADIELLWKQLEAEPGLEITVDLESRTVTAGENTYQFSVDDYTRWRLMEGLDDIGLTLRDEQAITDYEAKRPVYKPTITAEV

SEQ ID NO: 117 - DNA, 1398 bp, Corynebacterium humireducens
  CDS (301)..(1098): gene panB
ccgggcgcaaggcggacgtactcgtcattccgccaaccccggatgattctctgacgctctgccccggtggcacgcgtggtgctgatcaccggccccccgacctggttcatgtccgcagtctcccatcagcgcctgcggcacgcacctccacacgtcggtggcgttgtgaggcacccgcttgttcgcgagctccgggagttttcccaggtcaggttttcctggggtgaacaagagggtacttccgcacacatgccttccgtgggaacaggggggcatatactcttgcccatggtttcccggatgcgtacccgccatttcgcccaggccaaggccgagggccgcaagatctcctgcctgaccgcctacgacgcgcccaccgccgcgatcttcgatgaggcgggcatcgacctgctcctcgtcggcgattccgccgccaacgtcgtcctgggccaggactcgaccctgtcgatcacggtcgaggagatgatgaccatggcgaccgccgtcgcccgcggcaccgaacgcgccttcgtggtcaccgacctgcccttcggctcctacgaggtctcccccgcccaggcgctggagacggccgcccggttcatgaagcagaccggtgtcgccgcggtgaagatcgagggcggcgtcgagatcgccccgacgatccgcacgctcgtcgacgccggcatccccgtcatggcccacatcggctacaccccgcagtccgagcacgccctcggcggctacgtcgtccagggtcgcggggaggccgcggagaagctgcgcgccgacgccctcgccgtccaggaggccggcgccttcgccgtcgtcctcgagatggtccccgccggcatcgccggggagatcacccgcgagctcaccatcccgacgatcggcatcggcgccggcgccgacaccgacggccaggtcctcgtgtggaccgacgccttcggtctcacgcgcggccgtacgccgcgtttcgcgcgtcgttacgcggagatcggggacatgctcctcgacgccgcccgtgcctaccgcaccgacgtcgagtccggctccttcccggacgagtccgagtccttccgggacgagcagtgaccgtcgtcgcgcgcactgtcgcgcagctgcgttccgccgtcgccgatctgcagggttccgtcggcctcgtgccgaccatgggtgcgctccacgagggtcacggccgtctggtgtccctggccgccgaggagaactcctcggtggtggtgagcatcttcgtcaacccgttgcagttcaccgacctcggcgactgcgacgacttccgccactacccgcgtgacctggacaaggacgtcgccttcctggagaagctcggcgtcgacgtcgtgttcgcgccgaccgacgaggcgatgtacccgg

SEQ ID NO: 118 - protein, 265 aa, Corynebacterium humireducens
MRTRHFAQAKAEGRKISCLTAYDAPTAAIFDEAGIDLLLVGDSAANVVLGQDSTLSITVEEMMTMATAVARGTERAFVVTDLPFGSYEVSPAQALETAARFMKQTGVAAVKIEGGVEIAPTIRTLVDAGIPVMAHIGYTPQSEHALGGYVVQGRGEAAEKLRADALAVQEAGAFAVVLEMVPAGIAGEITRELTIPTIGIGAGADTDGQVLVWTDAFGLTRGRTPRFARRYAEIGDMLLDAARAYRTDVESGSFPDESESFRDEQ

SEQ ID NO: 119 - DNA, 1452 bp, Corynebacterium humireducens
  CDS (301)..(1152): gene panC
cctcgccgtccaggaggccggcgccttcgccgtcgtcctcgagatggtccccgccggcatcgccggggagatcacccgcgagctcaccatcccgacgatcggcatcggcgccggcgccgacaccgacggccaggtcctcgtgtggaccgacgccttcggtctcacgcgcggccgtacgccgcgtttcgcgcgtcgttacgcggagatcggggacatgctcctcgacgccgcccgtgcctaccgcaccgacgtcgagtccggctccttcccggacgagtccgagtccttccgggacgagcagtgaccgtcgtcgcgcgcactgtcgcgcagctgcgttccgccgtcgccgatctgcagggttccgtcggcctcgtgccgaccatgggtgcgctccacgagggtcacggccgtctggtgtccctggccgccgaggagaactcctcggtggtggtgagcatcttcgtcaacccgttgcagttcaccgacctcggcgactgcgacgacttccgccactacccgcgtgacctggacaaggacgtcgccttcctggagaagctcggcgtcgacgtcgtgttcgcgccgaccgacgaggcgatgtacccggacggcctgccccaggtgtgggtgcgggccggcgagatgggtgagcgcctcgagggcgcctcccgtcccggccacttcgacggcgtgaccaccgtggtggccaagctgttccagctcatccagccggaccgcgcctacttcggtgagaaggacgcgcagcagctggcgatcatccagcgcatggtcatggacctggacttcccgctgcagatccgcccggtgccgatcatccgcggtgccgacggcctggccgagtcctcccgcaaccagcacctcacccccgaggcgcgggagcaggcgctcgtcctgccgcgcaccctggccgcgctgcgtgaccgcgccgccgccggtgaccccctcgacgtcgagggtgcccgcgaggcgctgcgctccgccgagggcgtggaactcgaccacctcgaggtcgtcgacgccgcgacgctgctgccggtctccgaggtcggcgccggcgcgctggccgtcgccgcgatccacgtgggtggcacgcggctcatcgacaacgtgcgactgcttccgccgcgcgcttagcgtaggggccgacgccgacgatcgtcgccgaaccggggccgagccagtccccgtagcccaccaggtgcagcggcagcccccggtcgaggacccgccggaagggacgcagcgccgggcggaagccggtgcaccagatgaggtgctccgcgtccacctcgtcgaggctgcggaacagcggcgtcgcccgcaggcggccggagtcccgcgcggccttcaccgcgggcaggaccacgatgtccccgagctcggagtccgcccccgggtcctcctccccgcgcaggatcgccagggcccgcaggc

SEQ ID NO: 120 - protein, 283 aa, Corynebacterium humireducens
VTVVARTVAQLRSAVADLQGSVGLVPTMGALHEGHGRLVSLAAEENSSVVVSIFVNPLQFTDLGDCDDFRHYPRDLDKDVAFLEKLGVDVVFAPTDEAMYPDGLPQVWVRAGEMGERLEGASRPGHFDGVTTVVAKLFQLIQPDRAYFGEKDAQQLAIIQRMVMDLDFPLQIRPVPIIRGADGLAESSRNQHLTPEAREQALVLPRTLAALRDRAAAGDPLDVEGAREALRSAEGVELDHLEVVDAATLLPVSEVGAGALAVAAIHVGGTRLIDNVRLLPPRA

SEQ ID NO: 121 - DNA, 1116 bp, Corynebacterium humireducens
  CDS (301)..(816): gene ilvH
gcgtcacccgcgaggaggacgtcctgccgacgatccagaaggcacgcgagatcaacgaccgcccggtcgtcatcgacttcatcgtcggtgaggacgcccaggtctggccgatggtcgccgccggcgcctccaactcggacatcgagtacgcacgtggtctgcgccccttcttcgagggtgacgagtccgcgggtgagtccccggccgacatccacggtgtcatggagaacgcccaggaggagaccgtcgaggaagtcctcgaggagcgcgcgaacgacagcgagaaggagaactaggacaatggcgaacaccgacatcatccgcaacaccctcagcgtcctggtccaggacgtcgacggcatcatctcccgcgtcgcaggcatgttcacccgccgtggctacaacctggtgtccatcgtctcggcgcacaccgacaccccgggcatcagccgcatcaccatcgtggtcgacgccaacgagctggtcatcgagcaggtcaccaagcagctcaacaagatcatcccggtgctcaaggtcgtccgcctcgaggaggacaccaccatcgcccgcgccatcatgctggtgaaggtcaacgccgacaacaccaaccgcccgcaggtcgtcgacgccgcgaacatcttccgcgcccgcatcgtcgacgtggcccaggagtccgtggtcatcgaggccaccggtaccccgggcaagctgcgcgccctgctggaggtcctcgagcccttcggtatccgtgagctcatccagtccggtcagatcgccctcaaccgcggtccgaagacgatggcaccgtccaagtaacaccccctcatcccacctggtgagacaacacgcatgaaagtcccaccaggtggggtacccctgtctcatgttgtggtacaaacaacaacagcacttgtataagacgaaaggcgagtttttctcccatggctattgaactgctttacgacgccgacgctgacctctccctcatccagggccgcaaggtcgccatcatcggctacggctcccagggccacgcccacgcccagaacctgcgtgactccggcgtcgaggtctgcatcggcctgcgcgacggctccaagtccgcggagaaggcca

SEQ ID NO: 122 - protein, 171 aa, Corynebacterium humireducens
MANTDIIRNTLSVLVQDVDGIISRVAGMFTRRGYNLVSIVSAHTDTPGISRITIVVDANELVIEQVTKQLNKIIPVLKVVRLEEDTTIARAIMLVKVNADNTNRPQVVDAANIFRARIVDVAQESVVIEATGTPGKLRALLEVLEPFGIRELIQSGQIALNRGPKTMAPSK

SEQ ID NO: 123 - DNA, 1944 bp, Corynebacterium humireducens
  CDS (301)..(1644): gene gdh
gaaggtggcggcggtgccctcacccccgtcggccatgggagcgagggtgatctcggcgtcccggatgatcgagcggacaccctcgccgatcagccgtgcggcctgatcggcggtggcagtgcccttgaaggagtcgggggcgatgatgatgtggaccatgggaagcagtctaggggtagtgggagtgacatattcaactccggagtgacttgcatgaaccgcgccgcccgtgaaaactataggccgttagaaaaccccatcccccgggctgcccgcgactgcgggccggaaaggactcgtatgtctattgacgagcaggtctcctcctactacaacatgctgctcaagcggaacgcaggagagccggagttccaccaggcagtcgcagaagttctcgcctccctcaagatcgtcctggagaaggatccgcactacgcggactacggcctcatccagcgcctgtgcgagccggagcgccagctcatcttccgtgtgccgtggatcgacgacaacggcgtggtacaggtcaaccgtggtttccgagtacagttcaactccgccctcggcccgtacaagggcggcctacgcttccacccgtccgtcaacctgggcatcatcaagttcctcggcttcgagcagatcttcaagaactccctcaccggcctgcccatcggcggcggcaagggcggctccgacttcgacccgaagggcaagtccgagctcgagatcatgcgtttctgccagtccttcatgaccgagctgcacaagcacatcggcgagtacaaggacgtccccgccggtgacatcggcgtcggcggccgggagatcggtttcctcttcggccagtaccgtcgtctggccggccagcacgagtccggcgtcctcaccggcaagggcctcgcctggggtggctccctcgtgcgcaccgaggccaccggctacggcgccgtctacctcacgcaggagatgatgaaggcccacggcgactccctctccggttcgaaggtcatcgtctccggctccggcaacgtcgccatctacgccatcgagaaggcccaggagctcggcgccaccgtcgtcggcttctccgactcctccggctgggtctccaccccgaacggcgtcgacgtcgagctgctccacgacgtcaaggagaagcgccgcgagcgcgtctcctgctacgccgaggaggccaccggcgcgaccttccacgccgagggctccatctgggacctcgccgccgacgtcgccctcccgtgcgccacccagaacgagctcaacggcgaccacgcccgcaccctggccgacaacggcatccgctacgtcgccgagggcgccaacatgccctccaccccggaggccatcgaggtcttccgtgagcgcggtatcttcttcgccccgggcaaggccgccaacgccggtggcgtggccacctccgccctggagatgcagcagaacgcctcccgtgactcctggtccttcgagtacacggaccagcgcctgcacaagatcatgtccaagatcttccgcaccatgtcccgcactgccgcagagtacggccacgagggcaactacgtcgtcggctccaacatcgccggcttcaagaaggtcgccgacgcgatgctcgcgcagggcgtcatctaaggctctccacaggattccctgaccccctggccctgccgcaccacacattgtgcggcagggccagtaatctttgagtcatgtatagagtcttcgaagccctggacgagctcaaccagaccgtggagcaggcctacggcgtgcccatgacctccaactgcatggtgccgcgcaacgacaccctcgcgcttctcgacgatctgcgtaacgccctgcccgtcgagatcgacgacgcccaggatgtcctggaccagcgcgacgagatcctccgcggggccgaggaccgggcccgcgacatgatcg

SEQ ID NO: 124 - protein, 447 aa, Corynebacterium humireducens
MSIDEQVSSYYNMLLKRNAGEPEFHQAVAEVLASLKIVLEKDPHYADYGLIQRLCEPERQLIFRVPWIDDNGVVQVNRGFRVQFNSALGPYKGGLRFHPSVNLGIIKFLGFEQIFKNSLTGLPIGGGKGGSDFDPKGKSELEIMRFCQSFMTELHKHIGEYKDVPAGDIGVGGREIGFLFGQYRRLAGQHESGVLTGKGLAWGGSLVRTEATGYGAVYLTQEMMKAHGDSLSGSKVIVSGSGNVAIYAIEKAQELGATVVGFSDSSGWVSTPNGVDVELLHDVKEKRRERVSCYAEEATGATFHAEGSIWDLAADVALPCATQNELNGDHARTLADNGIRYVAEGANMPSTPEAIEVFRERGIFFAPGKAANAGGVATSALEMQQNASRDSWSFEYTDQRLHKIMSKIFRTMSRTAAEYGHEGNYVVGSNIAGFKKVADAMLAQGVI

SEQ ID NO: 125 - DNA, 2037 bp, Corynebacterium humireducens
  CDS (301)..(1737): gene glutamine synthetase_1
agcgagccggggccggtctcggggaggccgagtttctctccggggtaccggccgggtgcgaaggggtcctcgtgttcgccggggatctgggggccgtcgagccagctacgcttggggttcgccataccgtagacattagccgggggcgtgcgggcaggggaaactcgagtttcctgcgactattgatcggtcaacagatagcagtttagaatgagcgacaggtaatagggagcggtgcccgcacctgtagactggctgagataccgcacgacctagagcgtcaacaaccaaggagtcatcgtggccttcaacacgatcgaagaagtcgtcaagtacatcaaggatgaaaacgtcgagttcgtcgacgtccgcttcacggacgtcccgggcaccgagcaccacttcaccatccccgcctcgatgttcgacgaggaggcggcggaggaaggcctcgccttcgacggctcctccatccgcggcttcaccacgatcgacgagtccgacatgaacctcctgccggacctcaagaccgccaagctcgaccccttccgcgaggccaagacgctgaacatcaagttcttcgtccacgaccccttcacccgcgagcccttctcccgcgacccccgcaacgtcgcccgcaaggccgaggagtacctcgcctccaccggcatcgccgacacctgcttcttcggcgccgaggccgagttctacctcttcgacaccgtccggttcgagacctccaccaacggcggcttctacgaggtcgactccgacgagggctggtggaaccgcggcaaggaggagcgtctcgacggccgccgcaacctcggctacaccaaccgcgtcaagggcggatacttcccggtcgccccctacgaccagaccgtggacatccgtgactccatggtgcgccacctgcagaacgccgacttccacatcgagcgcttccacaaggaggtgggcacgggcggccagcaggagatcaactaccgcttcaacaccctgctccacgccgccgatgatctgcagaccttcaagtacatcatcaagaacaccgccttcaacgccggcaagacggccacgttcatgcccaagcccatcgccggcgacaacggttccggcatgcacgcccaccagtcgctgtggaaggacggcgagccgctcttccacgacgagtccggctacgccggcctgtccgacatggcccgctactacatcggcggcatcctccaccacgccggcgccgtcctggccttcaccaacccgacgctgaactcctaccaccgcctggtcaagggcttcgaggcaccgatcaacctggtgtactcccagcgcaaccgctccgccgcgatccgcatcccgatcaccggctccaacccgaaggccaagcgcatcgagttccgcgccccggacccgtccggcaacccgtacctcggcttcgccgcgatgatgctcgccggcctcgacggcatcaagaaccgcatcgagccgatggccccggtggacaaggacctctacgagctcccgccggaggaggccgccgccatcccgcaggccccgacctccctcgaggcctccctggccgccctgcaggaggacaacgacttcctcaccgagggtgacgtgttcaccgaggacctcatcgaggcctacatccagctcaagtacgacaacgagatcaccccggcccgtctgcgcccgacgccgctggagttcgagctgtactacgactgctgaccatgcccccaccgcaacccccgcgccggagctttccgacgcgggggttgcgcgcctctcccctgtcagctaactgacagtaactatactttccaccgtgaacatatccctggcaggcccccgtcgcctcgcatccctcatcctgtcactgttcctggcgttgtccctggcccccgcggcacacgccgccaccggcagcccccaggaattcgtcccctacaccgacagccacggcacaagttcgaactaccacttctacccctccggccgcgagaacgccggactcctcgtccacctcga

SEQ ID NO: 126 - protein, 478 aa, Corynebacterium humireducens
VAFNTIEEVVKYIKDENVEFVDVRFTDVPGTEHHFTIPASMFDEEAAEEGLAFDGSSIRGFTTIDESDMNLLPDLKTAKLDPFREAKTLNIKFFVHDPFTREPFSRDPRNVARKAEEYLASTGIADTCFFGAEAEFYLFDTVRFETSTNGGFYEVDSDEGWWNRGKEERLDGRRNLGYTNRVKGGYFPVAPYDQTVDIRDSMVRHLQNADFHIERFHKEVGTGGQQEINYRFNTLLHAADDLQTFKYIIKNTAFNAGKTATFMPKPIAGDNGSGMHAHQSLWKDGEPLFHDESGYAGLSDMARYYIGGILHHAGAVLAFTNPTLNSYHRLVKGFEAPINLVYSQRNRSAAIRIPITGSNPKAKRIEFRAPDPSGNPYLGFAAMMLAGLDGIKNRIEPMAPVDKDLYELPPEEAAAIPQAPTSLEASLAALQEDNDFLTEGDVFTEDLIEAYIQLKYDNEITPARLRPTPLEFELYYDC

SEQ ID NO: 127 - DNA, 2037 bp, Corynebacterium humireducens
  CDS (301)..(1737): gene glutamine synthetase_2
catccccggcaaccgctggtgggacatgaccgaggagggcatcctgccgaaggagcgcctggtgaacatcggcgacatcgccgccggccgtgccctgggccgcgagaacgacgagcagatcttctgctactccatcggcggcatgcccgtggaggacgtcgcctgggcctgggacgtctaccacaacgccctggagaagggcatcggcaccaggctcaacctgtgggacacccccaccctcaagtaagcccctcaagcaagacacctgaacacaacaatctaggagccctgacacctgtcgtgtccttccagtccaccaccgacctgatcgacttcatgcgcgatgagggggtggagtacctggacatccgtttcaccgatgtccccggcacagaacacgcgctgacggttcccgccgcggcgctgaccgaggagaccgcggcggagggcttcgccttcgacggctcgtcgatcgcaggtttcacctcggtcgacgagtccgacatgaccctcatgccggacgtctcgacggcctacgtggaccccttccgtcaccggaagacggtgaacatgcagttcttcgtccacgaccccttcacccgcgaggcgttctcccgcgatccgcgcaacatcgcccgcaaggcggaggagtacatgcgtgcctccggcatcgccgacgagtgctacatcggcgccgaggccgagttcttcgtcttcgactcggtccgctactccaccgacgtccaccgttccttccaccaggtcgactccgacgagggctggtggaactccgacgcggagaccatgatcgacggttccccgaacctgggcaacaagatccgcgtcaacgacggctacttccccgtcgccccctacgacaagacgatcccggtgcgcgacgagatcgcgcacaacctctcgcaggtcggtttcgagatcgagcgtttccaccacgaggtctccacgggtggcatccaggaggtgaactaccgcttcaacaccctcctgcacgcggcggatgacctgcagaagttcaagtacatcgtgaagaacaccgccgacgcccacggcaaggtcgccaccttcatgccgaagccgcttctcgacgacggcggctgcggcatgcacgcccaccagtccctgtggaaggacggccgaccgctgttccacgacgaggaaggttacgccggcctctccgagaccgcccgccactacatcggtggcctgctggcccacgccccggcggtcctggcgttcaccaacccgacggtcaactcctaccgtcgcctctactccggtttcgaggccccggtgaacctggtgtactcccagcgcaaccgttccgccgcgatccgtatcccggtgaccggcccctccgccgccgccaagcgcatcgagttccgcgccccggacccctccggcaacccctacctcggtttcgcggcccagctgctggccggtctggacggcatcaagaaccgcatcgagccgggcgacccggtggacaaggacctctacgagctggagccggaggaggccgacaaggtgccgcgcgtcccgcactccctggagtcctcgctgtacgccctggagaacgaccacgagttcctcaccgagggcgacgtgttcaccgaggacctcatcgaggcctacatccagctgaagtacgacaacgagatcaacccgatgcgccaaggcccgacgccgaaggagttcgagctctacttcaactgctaggttcagcaggcatgcggcgcagttacgtcctcggggcgacagagcacacggacctccggggcatccggcgggtgctcgcacgctaccgctacgacgcgccgtgggtgcttctcgacgcccgccccgtcctcgaggtctcctggttcggggagggcgcggtgtcgttctacgccaccactcccccgctgcctcccgaccccgccctggcccgcctcctcttcgacctcgggtcctgcggactgctgctcggggtgtcgccggggccgccggacatcgtcatctgcggtggtcacagtacgg

SEQ ID NO: 128 - protein, 478 aa, Corynebacterium humireducens
VSFQSTTDLIDFMRDEGVEYLDIRFTDVPGTEHALTVPAAALTEETAAEGFAFDGSSIAGFTSVDESDMTLMPDVSTAYVDPFRHRKTVNMQFFVHDPFTREAFSRDPRNIARKAEEYMRASGIADECYIGAEAEFFVFDSVRYSTDVHRSFHQVDSDEGWWNSDAETMIDGSPNLGNKIRVNDGYFPVAPYDKTIPVRDEIAHNLSQVGFEIERFHHEVSTGGIQEVNYRFNTLLHAADDLQKFKYIVKNTADAHGKVATFMPKPLLDDGGCGMHAHQSLWKDGRPLFHDEEGYAGLSETARHYIGGLLAHAPAVLAFTNPTVNSYRRLYSGFEAPVNLVYSQRNRSAAIRIPVTGPSAAAKRIEFRAPDPSGNPYLGFAAQLLAGLDGIKNRIEPGDPVDKDLYELEPEEADKVPRVPHSLESSLYALENDHEFLTEGDVFTEDLIEAYIQLKYDNEINPMRQGPTPKEFELYFNC

SEQ ID NO: 129 - DNA, 2241 bp, Corynebacterium humireducens
  CDS (301)..(1941): gene glutamate synthase
ctggggttccgcgtcgaaggacaccatcaaactggcccgcctggccacccagaccggcctgttccccgtgtacgaggcggagtacggcgagatcacctcggtgaagaagatccgccgccccgccccggtcgaggactacctccgcctccagcgccgctacgcgcacctgttccggaaggacgcggacccgtccgtcatcgagcggctccaggcgctggcggaccgcaacatccgccgctacaacctcatcgacgaagagaccctcgacgagttcgtcaggttcgaaggagacgacgcacagtgagtaccggtaaccacgtcaacatcggcatgcccttcgccatcaccctgcagaccggctcctccctggcgaacaagaccggctcctggcgcagcgagcggcccgtgtacgtcgacctgctgccgccctgcaacaaggcgtgtcccgccggcgggaacatccagggctggctgtaccacgccgaggagggcgactacgagtccgcctggcgcgagatcatggtggacaacccgctgcccgccgtcatggggcgtgtctgctaccacacctgccagaccgcctgtaaccgcgcggaggtcgacgaggccgtcggcatcaacgcggtcgagcgcttcctcggggaccgtgccatcgaggaggggtggcaggtcgaacccgtcaaggacccctccggccggagggtcctcgtcgtgggttccggcccctccggcctgtccgcggcctaccacctcgcccgactcggccacgaggtgacggtccgcgaccggggtgagcggccgggcggcatgatgcgctacggcatcccctcctaccgcctgccccgccacatcctcgacgccgagatcgcgcgcatcgcggccctgggcgtcaccttcgagcagggggtcaccgtcaccgacgtcgagtccgaactcgagcttttcgacgccgtcttcaccgccgtcggtgcccagctgggccgcaacgtggaggtgcccgccgggtcggcggcgaccatcatgaacgccgttgacctgctgcgtgacaccgaggccggggaggcgccgctgctcggtcgtcgggtcgtggtctacggcggcggcaacacagccgtcgacgccgcccgcaccgcgcgtcgtctcggggcgaccgagtcggtcatcctctaccgccgcacccgcgaccacatgagcgcccacgactccgaggtcatggaggccgaggaggagggcatcaccatgcgctggctgtccaccgtcgaccacgtcgaggagggctccatcaggatcgagaagatggacatcgacgccgacggccacctcaccccgaccggtgagtacgaggagctcgccgccgactccctcgtcatggcgctgggccaggagtcggacctctccctgctcgagggcgtggagggggtggagatctcccgcggcgtcgtcgccgtcgacgagcagatgatgaccggacgtgcgggcgtcttcgccggcggcgacatggtgccgagcgagaagaacgtcaccgtcgccatcggccacggcaagaaggcggcccggtacatcgacggttggctccgtggcgaaccctacgtgcccgccgtcaagcctgcagacgcgactctcgaccgtatggagacctggtactactcagaggccccgcaccaggtgcgcgaacgcctcgagggcgcccgccgcgcctccacctttgacgaggtcgtccggggactcgacgccgactccgccctgctcgaggcacgccgctgcatgtcgtgcggcaactgcttcggctgcgacaactgcttcggcgtctgcccggacaacgcggtcaccaaattggcgccgggtgagtacgagttcaagtacgactactgcaagggctgcggcatctgcgcggaggagtgcccgtgcggcgcgatctccatgattcccgaggagaactgaggagaactgaccgcccgcaacaagttagagtatgggcaccaacgtcgtcccctgaccagaaggatccccatgcgccgcaccctcatcgccctcggcaccgccaccgccctcaccctgggggcggtcccggccgcccacgcccagcccgcgaacgccgtcaccgcccagatcgaggagctgccggccgacatgcgggcaggctcctccggcgcggagaagctctcctccgcctccaccgaggccgagaagcaggagggtgccctgctgctgggacgcgactggctgctcggtttcgccgcg

SEQ ID NO: 130 - protein, 546 aa, Corynebacterium humireducens
VSTGNHVNIGMPFAITLQTGSSLANKTGSWRSERPVYVDLLPPCNKACPAGGNIQGWLYHAEEGDYESAWREIMVDNPLPAVMGRVCYHTCQTACNRAEVDEAVGINAVERFLGDRAIEEGWQVEPVKDPSGRRVLVVGSGPSGLSAAYHLARLGHEVTVRDRGERPGGMMRYGIPSYRLPRHILDAEIARIAALGVTFEQGVTVTDVESELELFDAVFTAVGAQLGRNVEVPAGSAATIMNAVDLLRDTEAGEAPLLGRRVVVYGGGNTAVDAARTARRLGATESVILYRRTRDHMSAHDSEVMEAEEEGITMRWLSTVDHVEEGSIRIEKMDIDADGHLTPTGEYEELAADSLVMALGQESDLSLLEGVEGVEISRGVVAVDEQMMTGRAGVFAGGDMVPSEKNVTVAIGHGKKAARYIDGWLRGEPYVPAVKPADATLDRMETWYYSEAPHQVRERLEGARRASTFDEVVRGLDADSALLEARRCMSCGNCFGCDNCFGVCPDNAVTKLAPGEYEFKYDYCKGCGICAEECPCGAISMIPEEN

SEQ ID NO: 131 - DNA, 2817 bp, Corynebacterium humireducens
  CDS (301)..(2517): gene isocitrate dehydrogenase
cgccgacgtagtgccagcccgcgtcgagggcgggctgcaacgccttgacggactcctcgacggtcgcgcgcacctcctgcaggagcaccacgtcagccggggactgctccagccaggccagcatgcccggattgtcctcgttgcgctgcttgacggcggcgcggattccattgacgttgacggaggtgatggtcagactcataggaaccaccatatcgccgttggtggcagggcccctgccccgccgggtatccttagccgttgacactgccgagattgaagaaagcgttagggagttacatggcaaagatcatctggacccgcaccgacgaggccccgctgctcgcgacctattcgttcaagcctgttgttgaggccttcgccgccaccgcgggtatcgatgtcgagacccgcgacatctccctggccggccgcatcctggcccagttcccggaccgcctcaccgaggagcagcgagtcgctgacgccctcaccgagctcggcgacctggccaagaccccggaagccaacatcatcaagctcccgaacatctcggcgtccgtcccgcagctcaaggcagccatcaaggagctgcaggaccagggatacgacctccccgactacgtcgactccccggagaccgacgaggagaaggacgcccgcaagcgctacgacgtagtaaagggttccgctgtgaacccggtactccgtgagggcaactccgaccgtcgtgccccggaggccgtgaagaacttcgtccgcaagaacccgcaccgcatgggtgagtggtccgccgactccaagaccaacgtcgccaccatggactccgacgacttccgtcacaacgagcagtccgtcatcctcccggccgaggacaccctctccttcgtccacgtcgccaccgacggcaccgagaccaagctccgcgacgacctcaaggtcctcgagggcgaggtcgtcgacggcaccgtcatgcgcgccgccgccctgcaggagttcctggccgagcaggtcaagcgcgcccaggacgagggcatcctgttctccgtccacctcaaggccaccatgatgaaggtctccgacccgatcatcttcggctacgtcgtccgcgccttcttcgccgacgtctacgagaagtacggcgaggagctgctggccgccggtctcgacggcgagaacggcctcggcgccatcttctccggactcgaggaactggagaacggcgaggagatccgccgtgccttcgacgaggccctcgagaacggccctgacctggcgatggtgaactccgacaagggcatcaccaacctgcacgtcccgtccgacgtcatcgtcgacgcctccatgcccgccatgatccgcacctccggccagatgtggaacaaggacgacaagacccaggacaccctggccgtcatcccggactcctcctacgccggcgtcttccagaccgtcatcgacgactgcaaggccaacggcgccttcgacccgaccaccatgggcaccgtcccgaacgtcggcctcatggcccagaaggccgaggagtacggctcccacgacaagaccttccgcatcgccgcggacggcaaggtcgaggtccgcaactccgccggtgacgtcctgctcgagcacgaggtctccgagggcgacatctggcgcgcctgccagaccaaggacgccccgatccaggactgggtcaagctggccgtcgaccgcgcccgcatctccggcatgccggccgtcttctggctggacccggagcgcgcccacgaccgcaacctcaccaccctggtggagaagtacctggccgaccacgacaccgagggcctggacatccgcatcctctccccggtcgaggcgacccagctgtccgtcgaccgcatccgccgcggcgaggacaccatctccgtgaccggtaacgtcctgcgtgactacaacaccgacctcttcccgatcctcgagctgggcacctccgccaagatgctctccgtcgtgccgctgatggccggtggcggcctcttcgagaccggtgccggtggctccgccccgaagcacgtccagcaggtcgtcgaggagaaccacctgcgctgggactccctcggtgagttcctcgccctggccgagtccctgcgccacgtcgcccgcacccaggacaacgcgaaggccgccgtcctggccgacgccctggacaaggccaccgagaaggtcctgtccgagggcaagtccccgtcccgcaaggtcggcgagatcgacaaccgtggctcccacttctacctcgcgtcctactgggccgaggccctggccgcacagtccgacgacgccgagctggccgcgaccttccagccggtcgccgaggccctggccgccgacgccgcgaccatcgaccaggagctcatcgacaaccagggttccgccgtggacctcggcggctactacgccccgtccgatgagaagacctccgacgtgatgcgtccgtccgcgaagttcaacgagatcatcgacggtctgaagaagtaacccccgctttccgacgccgccctgccccgccaccggggcagggcggcgtcgcctttgggcagggccccggacgaaccacttggtctaccgtccctttatttttattcatgcgccctgaactgcggagacagggtttggacagacagctcggtttacgtcgaaaagcggtgcgccgtactcttctcccatgacccgatacgacaactccgcagcagaccagtgggacttcgagacccgctccatccacgccggccagaacccggaccccgcgaccggttcccgtaaccagccgatccacct

SEQ ID NO: 132 - protein, 738 aa, Corynebacterium humireducens
MAKIIWTRTDEAPLLATYSFKPVVEAFAATAGIDVETRDISLAGRILAQFPDRLTEEQRVADALTELGDLAKTPEANIIKLPNISASVPQLKAAIKELQDQGYDLPDYVDSPETDEEKDARKRYDVVKGSAVNPVLREGNSDRRAPEAVKNFVRKNPHRMGEWSADSKTNVATMDSDDFRHNEQSVILPAEDTLSFVHVATDGTETKLRDDLKVLEGEVVDGTVMRAAALQEFLAEQVKRAQDEGILFSVHLKATMMKVSDPIIFGYVVRAFFADVYEKYGEELLAAGLDGENGLGAIFSGLEELENGEEIRRAFDEALENGPDLAMVNSDKGITNLHVPSDVIVDASMPAMIRTSGQMWNKDDKTQDTLAVIPDSSYAGVFQTVIDDCKANGAFDPTTMGTVPNVGLMAQKAEEYGSHDKTFRIAADGKVEVRNSAGDVLLEHEVSEGDIWRACQTKDAPIQDWVKLAVDRARISGMPAVFWLDPERAHDRNLTTLVEKYLADHDTEGLDIRILSPVEATQLSVDRIRRGEDTISVTGNVLRDYNTDLFPILELGTSAKMLSVVPLMAGGGLFETGAGGSAPKHVQQVVEENHLRWDSLGEFLALAESLRHVARTQDNAKAAVLADALDKATEKVLSEGKSPSRKVGEIDNRGSHFYLASYWAEALAAQSDDAELAATFQPVAEALAADAATIDQELIDNQGSAVDLGGYYAPSDEKTSDVMRPSAKFNEIIDGLKK

SEQ ID NO: 133 - DNA, 3378 bp, Corynebacterium humireducens
  CDS (301)..(3078): gene aconitate hydrase
aggtcatcggtgtcgatgccggcgggaatcatcgtggtgcggcttctttcgcatggggcggcgtgcggacaccgctatttctatcctccgcgggtgtggcgggggtggcgacgcgccggacacacagcgaaaagccacaaacaagacgctcgtactgttagaattgcagcggtcgttggtccgaatccctacacttggggacgtaccaccgcgttctgccggtgcacgcctaccttgaccggggtagacgggtgcgggtaacgaacattccagttcaatgaagaggaaatggagctccctgtgaccgaaagcaagaactccttcaacgccaagcgcaccctcgaggtcggcgagaagtcctacgactacttcgccctcgacgccgtgccgggcatggagaagctgccgtactccctgaaggttctcggcgagaaccttctgcgtaccgaggacggcgcaaacatcaccaccgagcacatcgaggcaatcgccaactgggatccgaaggctgagccctccatcgagatccagttcaccccggcacgtgtcctcatgcaggacttcaccggtgtcgcctgtgcagtcgacctggccaccatgcgcgaggccgtgaagaccctgggcggcgacccggacgacgtcaacccgctgaacccggccgagatggtcatcgaccactccgtcatcgtcgaggcattcggtacctccgccgctctggagaagaacgtcgagatcgagtaccagcgcaacgaggagcgctaccagttcctccgctggggtgccgagaacttctccaacttccgcgtcgttcccccgggaaccggcatcgtccaccaggtcaacatcgagtacctgtcccgcgttgtcttcgacaacaacggcctcgcctacccggacacctgcatcggcaccgactcccacaccaccatggagaacggcctgggaatcctgggctggggcgtcggcggcatcgaggccgaggctgccatgctgggccagccggtctccatgctcatcccgcgcgtcgtcggcttcaagctgaccggtgagatcccggccggcgtcaccgccaccgacgtggtcctcaccatcaccgagatgctgcgtaaccacggcgtcgtccagaagttcgtcgagttctacggcaacggcgtcaagtccgtcccgctggcgaaccgcgccaccatcggcaacatgtccccggagttcggctccacctgtgccatgttcccgatcgacgaggagaccatcaagtacctcgagctcaccggccgctccgaggaggacatcgcccgcgtcgaggcatacgccaaggctcagggcatgtggctctacgaggacgccccggaggccgagtactccgagtacctcgagctggacctctccaccgtcgtcccgtccatcgccggcccgaagcgcccgcaggaccgcatcctcctctccgaggccaaggcacagttccgcaaggacctgccgacctacgcctccgacgaggtcgctgagccggtccgcgccaccaaggccgtcggcgacgactacaaccagtccttcccgggcaacggcgagtccgctgccgactccgccgagggccgcgcctccaagccggtcatcgtcgagtccccgcagggcggcgagtacaccctcgaccacggcatggtggccatcgcctccatcacctcctgcaccaacacctccaacccgtccgtgctggtcgcagccggcctgctggcccgcaaggccaacgagctgggcctgaagtccaagccgtgggtcaagaccatctgcgccccgggctcccaggtcgtcgacggttacttcaagcgcgccgacctctggaaggatctggaggccctgggcttctacctctccggcttcggctgcacctcctgcatcggcaactccggtccgctcccggctgaggtctcctccgccatcaacgagcacgacctggccgccaccgcagtcctgtccggcaaccgtaacttcgagggtcgtatctcccccgacgtcaagatgaactacctggcctccccgccgctggtcatcgcctacgccatcgccggcaccatggacttcgacttcgagaccgatgccctgggtcaggacaaggacggcaacgacgtcttcctgaaggacatctggccctccaccgaggagatcgaggagaccatcgcggcctccatctcccgcgagctgtacgaggccgactacgctgacgtcttcaagggcgacaagcagtggcaggagctcgacatcccgaccggcaagaccttcgagtgggacgagaactcctcctacatccgtaaggcaccgtacttcgacggcatgccgctcgagccgcagccggtcgaggacatcaagggcgcccgcgtcctcgccaagctcggcgactccgtgaccaccgaccacatctccccggcctcctccatcaagccgggcaccccggcagcccagtacctggactccatgggtgtcgagcgcaaggactacaactccctgggctcccgtcgtggtaaccacgaggtcatggtccgcggtaccttcgcgaacatccgcctggccaaccagctggtcgacgtcaccggtggctacacccgtgacttcacccaggagggtggcccgcaggcctacatctacgacgccgccatgaactacaaggaggccggcaccccgctggtcgtcctgggtggcaaggagtacggcaccggttcctcccgtgactgggccgcgaagggcaccatcctgctcggcgtgaaggccgtcatcaccgagtccttcgagcgtatccaccgctcgaacctgatcggtatgggtgtcatcccgctgcagttcccggagggcgagtcccacgagtccctgggcctggacggcaccgaggtcttcgacatcgagggcatcaccgccctgaacgagggcgagaccccgaagaccgtcaaggtcaccgccaccaaggaggacggctccaccgtggagttcgacgcgattgtccgcatcgacaccccgggtgaggccgactactaccgcaacggcggcatcctgcagtacgtcctgcgtcagatgatcgctgctgccaagtaagcgagcatcctcccgcagtgtgaactgcctctgagagggggctgcatccccggctaaggcgtcacgccaccggggagagcagccccctctcccctttttccctattcccccgacaggagtcccctcatgcccgtggtcagcgacaccgagttgacgcgtcgtcagaccgagatcctcgaaggcgcgcggcgttgcttcgccgagtacggctacgagggcgccacggtgcgccgcctcgaggaggccacgggcaagtcgcggggtgcgatcttccaccacttcggtgacaaggagaacctc

SEQ ID NO: 134 - protein, 925 aa, Corynebacterium humireducens
VTESKNSFNAKRTLEVGEKSYDYFALDAVPGMEKLPYSLKVLGENLLRTEDGANITTEHIEAIANWDPKAEPSIEIQFTPARVLMQDFTGVACAVDLATMREAVKTLGGDPDDVNPLNPAEMVIDHSVIVEAFGTSAALEKNVEIEYQRNEERYQFLRWGAENFSNFRVVPPGTGIVHQVNIEYLSRVVFDNNGLAYPDTCIGTDSHTTMENGLGILGWGVGGIEAEAAMLGQPVSMLIPRVVGFKLTGEIPAGVTATDVVLTITEMLRNHGVVQKFVEFYGNGVKSVPLANRATIGNMSPEFGSTCAMFPIDEETIKYLELTGRSEEDIARVEAYAKAQGMWLYEDAPEAEYSEYLELDLSTVVPSIAGPKRPQDRILLSEAKAQFRKDLPTYASDEVAEPVRATKAVGDDYNQSFPGNGESAADSAEGRASKPVIVESPQGGEYTLDHGMVAIASITSCTNTSNPSVLVAAGLLARKANELGLKSKPWVKTICAPGSQVVDGYFKRADLWKDLEALGFYLSGFGCTSCIGNSGPLPAEVSSAINEHDLAATAVLSGNRNFEGRISPDVKMNYLASPPLVIAYAIAGTMDFDFETDALGQDKDGNDVFLKDIWPSTEEIEETIAASISRELYEADYADVFKGDKQWQELDIPTGKTFEWDENSSYIRKAPYFDGMPLEPQPVEDIKGARVLAKLGDSVTTDHISPASSIKPGTPAAQYLDSMGVERKDYNSLGSRRGNHEVMVRGTFANIRLANQLVDVTGGYTRDFTQEGGPQAYIYDAAMNYKEAGTPLVVLGGKEYGTGSSRDWAAKGTILLGVKAVITESFERIHRSNLIGMGVIPLQFPEGESHESLGLDGTEVFDIEGITALNEGETPKTVKVTATKEDGSTVEFDAIVRIDTPGEADYYRNGGILQYVLRQMIAAAK

SEQ ID NO: 135 - DNA, 1752 bp, Corynebacterium humireducens
  CDS (301)..(1452): gene citrate synthase
agctgctctccgcccagcagctcgaggagctcggcttcaacgccgtcatctacccggtgaccaccctgcgcatcgccatgggacaggtcgaggaggctctcgcggagatcgccgccaccggcacccagaccgggtgggtcgaccgcatgcagcaccgctcccgcctctacgaactgctccgctacaacgagtacaacgccttcgaccaggaggttttcacgtactccgccgacacctaccagcccaccttccagtagcccaccagcaactcctgacattccttgaaaggggatgagtaccatgtccgacaacaccaacatcgaggtccgcaagggtctctacggcgtgatcgccgactacaccgcagtctccaaggtcatgccggagaccaactccctgacctaccgcggatacgccgtccaggacctcgtcgcagagtgctccttcgaggaggtcttctacctcctgtggaacggtgagctgccgaacgaggagcagctggcggagttcaacaggcgcggccgttcctaccgcaagctcgacgccggcctgatcgcactcatccactccctgccgctcgactgtcacccgatggacgtcatgcgcaccgccgtgtcctacatgggcaccaaggactccgagcacttcaccccggacgccgaccacatcacccacgtcggccacaacctcctcgcccagctgccgatggtgctggccatggacatccgccgccgtcagggcctcgacatcgtcgccccggacccggacaagtccgtcgcccacaacctgctgtcgatggtcttcggcaacggcccggagtccccggcgtccaacccggacgacgtgcgtgacttcgagaagtcgctcatcctctacgccgagcactccttcaacgcctcgaccttcacctcgcgtgtgatcacctcgacccgctcggacgtctactccgcgatcaccggtgccatcggcgccctcaagggcccgctgcacggcggcgccaacgagttcgtcatgcacaccatgctggagatcgacgacccggagaaggccgccgactgggtcaacaacgccctggacaacaaggacctcatcatgggcttcggtcaccgcgtgtacaagaagggtgactcgcgtgtcccgtccatggaggcgtccttccgtgacctcgccgagcgtcacgacggcgccaagtgggtcgccatgtacgagaacatgcgcgacgccatggacgcccgcaccggcatcaagccgaacctggacttcccggccggcccggcgtaccacctgctcggcttcccggtcgacttcttcaccccgctgttcgtcgtcgcccgcatcgccggctggaccgcccacatcgtggagcagtacaacgacaactccctgattcgtccgctctccgcctacaacggccccgagcagcgccaggtcaccccgctggccgcccgttagccccacggccggcaccggaccaccgcgacgcccacggcactgcccacacattggggtggtgcgcgtgggtttcgctgttcggaacacctgtcggcccattccgcagggcgggacagaaacggcctttcgggcgcccgtcccgcggagtgcggaaatggaccgcaccgggtccaccacctgcagataccccctgtgactaggggatactcccccgaagacaaccctctttcttgcgatactgtggtgtgccagagagctcacccgctctcagacacacccccgacatgacgttcggaaagg

SEQ ID NO: 136 - protein, 383 aa, Corynebacterium humireducens
MSDNTNIEVRKGLYGVIADYTAVSKVMPETNSLTYRGYAVQDLVAECSFEEVFYLLWNGELPNEEQLAEFNRRGRSYRKLDAGLIALIHSLPLDCHPMDVMRTAVSYMGTKDSEHFTPDADHITHVGHNLLAQLPMVLAMDIRRRQGLDIVAPDPDKSVAHNLLSMVFGNGPESPASNPDDVRDFEKSLILYAEHSFNASTFTSRVITSTRSDVYSAITGAIGALKGPLHGGANEFVMHTMLEIDDPEKAADWVNNALDNKDLIMGFGHRVYKKGDSRVPSMEASFRDLAERHDGAKWVAMYENMRDAMDARTGIKPNLDFPAGPAYHLLGFPVDFFTPLFVVARIAGWTAHIVEQYNDNSLIRPLSAYNGPEQRQVTPLAAR

SEQ ID NO: 137 - DNA, 3372 bp, Corynebacterium humireducens
  CDS (301)..(3072): gene pepc
cggttccgtcaagaccgactcggtcgccgagatcgtcggtcagcccgacgtcgacggtggtctcgtcggtggcgcctcgctcgacggcgaggagttcgccaagctggcggccgccgcggcgtccgtcgtctagcatcacctcatccaccggccccgggcactgaacattcagtgcccggggccggtgtcctttctccggggaatatggtgcgcaatccccacgcacggccgtcatatgcgtcatgatggggaggcgaaccgcatccccgccttcttcgagtacgaacagggagacactcaatgaccgtccgcgatcatctgcaggaagacatccgctacctcggccgtatcctcggccaggtcatcgcggaacaggagggcgaggacgtgttcaacctcgtcgagcacgcccgccagcaggccttcgaggtggccaagggcaacgcctccctggaggtgctcgtcgacctgttccggaacatcgagccggagcgcgcgaccccggtgatccgggcgttcagccacttcgccctgatggcgaacctcgcggaggacatccacgacgacttccaccgggagcgcatcctcgatgagggcggggcccccgactccaccctcaacgccacgtgggagaagttccgggaggccggcgtcagtgccgcggacatcgagaggtcgctgtctgccgggctcgtcgccccggtgctcaccgcccacccgacggagacccgccgccgcaccgtcttcgacgcccagaagcacatcaccgagctcatgctgcagcggcacgccgtccaggacgcggagccgaacgcccgcaccgaggaccgtctcgcggagatcgagcgcaacatccgccgccgcatgaccatcctgtggcagaccgcgctcatccggcaggcccgcccccgcatcgaggacgagatcgaggtcggcctgcgctactacacgctctccctgctccgggagatcccggcgctcaaccggcacgtcgtcgacacgctcacggagcgtttcggcgccgacctgcgcaacagcgccggtcaggccatcgtccgcccgggctcctggatcggcggcgaccacgacggcaaccccttcgtcaccgccgacacactggactacgcttcccgacgcgccgcccagaccgtcctcaagtactacgtcacgcagctccacgccctcgagcacgagctgagcctctccgaccgcatgacctccgtcaccgtggagctcgtcgccctcgccgggcggggaaagaacgacgtcccctcgcgtgtcgacgagccctaccgccgcgccgtccacggcgtccggggccgcatcctcgccacgaccgcggcgctcatcggggaggacgccgtcgagggcgtctggcaccgcgagcatgagccctacggctccccgcaggagttcgaggcggacctcagggtcatcgacacctcgctgcgtgcctcccacgacgagatcatcgccgacgaccgtctcagctccatccgggcggccgtcgcctccttcgggttccacctgtactcgatcgacctgcgacagaactccgagtccttcgagaacgtcctcaccgaggtcttcgccaccgcgcacgtccaccccaactacgacacgctgcgggaggaggtgaagatcgagctgctcacccgcgaactgcagaccccgcgccccctcgtcccgcgcggctaccggggcttctccgagccgacccagcgggagctcgacctcatctcccaggccgcggactccgtcgcccgcttcggcgagcagatgatcccgcaccagatcatctccatggcgcagtcggtcagcgacatcctcgagccgatggtgctgctcaaggaggtcggcctcatccaggccaacggccagggcccgaccggcagcgtcgacatcatcccgctgttcgagacgatcgacgacctccaggccggcgccggcatcctccgtgagctgtgggacctgccgatctaccgggcgtacctcgcccagcgcggcgacatccaggaggtcatgctcggctactcggactccaacaaggacggcggctacttcgccgccaactgggcgctctacgacgccgagaccgacctggtgaaggtcggccgcgagtacggtgtgcgcctgcgactcttccacggccgcggcggcaccgtcggccgtggtggcggcccctcctacgacgcgctcctcgcccagccgcagggggcggtcgacggttccgtgcgcatcaccgagcagggcgagatcatctcggccaagtacggctccccgcgtacggcccgccgcaacctggaggcactggtctccgcgacgctcgaggccagcctgctcaccgtcgacgacctcgccgaccgggcccgcgcgacgcagataatgagcgaactcgcgcagatctcccgccgcaagtactccgagctcgtccacgaggacccggggttcatcccgtacttcacccagtcgaccccgctcgacgagatcggctccctcaacatcggctcccgcccgaccgcccgcaagcagaccaagggcgtcgacgatctccgcgccatcccgtgggtgctcgcctggtcccagtcgcgtgtgctgctgccgggctggttcggcgtcggcacggccctggccgagtggatcggggagggggaggacagggacgagcgcatcgccgagctgcgggagctctacgagtcctggcccttcttcacctcgatcatgtccaacatggcgcaggtcatgtcgaaggcgggcatggatctcgcggagctctacgcccggctcatcgacgaccgggaggtcgccgagcgcgtccacggtgtcatcacggaggagttcgagctcacccgcgagatgttcagcaccgtcaccggcagcgccgagctgctcgccgacaacccggcgctggcccgttcggtgcgcaggcgcttcccgtacctgctgccgctcaacatcatccagctggagctgctgcgccgccaccgtgccggcgactcccgacgcgccgtgtcccgcggcatccagctgacgatgaacggactcgccaccgcactgcgcaactccgggtagacctggtgtagactgagccggagtttgtgccgcccgattcccgcaaaggaccttcatgaccctcgcactccagatcatcctcgtgctcaccgccgtgctcatgacggtgttcgttctgctgcacaagggtaagggcggcggcctgtccagcctcttcggtggcggcatgcagtcgaacctctcgggttcgacggtcgtcgagaagaacctcgaccgctacacgatcctcatggccgtcatctggatcgcctgcatcgtggcgctgaacctcatccaggctttcgccggctaggttcaatg

SEQ ID NO: 138 - protein, 923 aa, Corynebacterium humireducens
MTVRDHLQEDIRYLGRILGQVIAEQEGEDVFNLVEHARQQAFEVAKGNASLEVLVDLFRNIEPERATPVIRAFSHFALMANLAEDIHDDFHRERILDEGGAPDSTLNATWEKFREAGVSAADIERSLSAGLVAPVLTAHPTETRRRTVFDAQKHITELMLQRHAVQDAEPNARTEDRLAEIERNIRRRMTILWQTALIRQARPRIEDEIEVGLRYYTLSLLREIPALNRHVVDTLTERFGADLRNSAGQAIVRPGSWIGGDHDGNPFVTADTLDYASRRAAQTVLKYYVTQLHALEHELSLSDRMTSVTVELVALAGRGKNDVPSRVDEPYRRAVHGVRGRILATTAALIGEDAVEGVWHREHEPYGSPQEFEADLRVIDTSLRASHDEIIADDRLSSIRAAVASFGFHLYSIDLRQNSESFENVLTEVFATAHVHPNYDTLREEVKIELLTRELQTPRPLVPRGYRGFSEPTQRELDLISQAADSVARFGEQMIPHQIISMAQSVSDILEPMVLLKEVGLIQANGQGPTGSVDIIPLFETIDDLQAGAGILRELWDLPIYRAYLAQRGDIQEVMLGYSDSNKDGGYFAANWALYDAETDLVKVGREYGVRLRLFHGRGGTVGRGGGPSYDALLAQPQGAVDGSVRITEQGEIISAKYGSPRTARRNLEALVSATLEASLLTVDDLADRARATQIMSELAQISRRKYSELVHEDPGFIPYFTQSTPLDEIGSLNIGSRPTARKQTKGVDDLRAIPWVLAWSQSRVLLPGWFGVGTALAEWIGEGEDRDERIAELRELYESWPFFTSIMSNMAQVMSKAGMDLAELYARLIDDREVAERVHGVITEEFELTREMFSTVTGSAELLADNPALARSVRRRFPYLLPLNIIQLELLRRHRAGDSRRAVSRGIQLTMNGLATALRNSG

SEQ ID NO: 139 - DNA, 2346 bp, Corynebacterium humireducens
  CDS (301)..(2046): gene pyruvate dehydrogenase
cggtcgccgagcgtgcccgtgccgagcatgagcccggccagcacgagggggtaggcgttgatgatccacagcgcctgcacctcggaggtgtggagctgtctgcgcagctcggggagcgcggtgaagaggatcgagttgtccaccccgaccatcagcagccccagggagatgatggcgaggaaggcccaccgctgggccggggtggagtcgacgttgtcgaggtgcgtcacgcagcggaactgtaccgaccgttcgttacagtttcaacgcggggcatgaatcctccgtacgctcgggaccatggcacgcacctacgcacagcagctcgtcgacgccctcgagaggcagggcgtggaacggatctacggagtcgtcggggacagcctcaaccccatcgtcgacgccgtccgcacctccccgatcgagtggatccacgtccgcaacgaggaggccgccgccttcgccgccggcgccgagtccctcctcaccggccgcctcgccgtgtgcgcgggctcctgcggccccggcaacctccacctcatccagggtctctacgacgcccaccgcaacggcgcccacgtcctcgccctggcctcccacatccccagcaaccagatcggtacctcatacttccaggagacccaccccgaacagctcttcgcggaatgttccggttactgcgagatggtcaactccgccgaccagggcgcccgcgtcctgcaccacgcgatccagtcgacgatggccgggcagggcgtgtccgtgctggtcatcccgggggacatcgccacgcaggacgccggcgacgaccggttcctgcagtccaccgtcgccaccggccgccccgtgctccaccccgacgcccgcgaggccgccgccctggtcgcggccatcaacgccgccgacacggtgaccctgttctgcggcgcaggcgtacgcgacgcccgcgagcaggtcctcgccctggcggagaagatcaaggcccccatcggccacgccctcggcggcaagatgcacatccagcacgacaaccccttcgacgtcggcatgtccgggctcctcggctacggcgcctgccacgacgcactgcacgacgccgacctgctcatcctcctgggcaccgacttcccctacaccgagttcctgcccaccgggaacgtcgcgcaggtcgacagcgacgccgcgcacatcggccgccgcaccacggtgcaccacccggtggtcggcgacgtcggcgccaccctcgacaccatcctcccgcacctggaggagaagaccgaccgcagcttcctcgacgggatgctccgcaagcacgcccggacgctggagaaggtcgtggaggtgtacacgcgggacgtcgggaagcacacccccatccacccggagtacctcgccgccgtcctcgacgagctcgccgccgacgacgccgtgttcaccgtcgacaccggcatgtgcaacgtgtgggccgcgcgctacctcacccccaacggacgacgcgcgcagatcggctccctccgccacggcacgatggccaacgcgctgccgcacgccatcggcgcgcagttcgccgaccggaaccgtcaggtcatcagcctcaacggcgacggcggcctcgccatgctcctcggcgaactgctcaccgtggaactccacgacctgcccgtgaagatggtcgtgttcaacaactcctcgctcggcatggtcaaactcgagatgctcgtcgagggcatgccccagcacggcaccgaccacgggcaggtcgacttcgcggcgatcgcggccgccgcgggcatccactccgtgctcatcgacgaccccgccaccctccgcgagcagctcgccgcggcgctcgcccaccccgggcccgtgctcatcgacgtccgcaccgaccccgacgccctctccctcccgccggagatcacctgggagatgctcatcggcttctcccgggccgcgacccgtaccgtcctcggcggcggcgtcggcgagatggtgcacctcgcgcgcacgaacctgcgcaacatcggcgcggccggggcggtctagtctgggcgtcatgaccccgaccgtccggatcgacctcgcccgcctcgacgcgaacatcgccgcgcaacccgggcggctgcgaccgcacgtgaagacccacaagatcctggagatcgcccgccggcagctcgcggcgggtgcccacggcctcacggtcgcgacggtgggggaggcggaggtcttcgccgaggtctgcgacgacatcttcatcgcctaccccgtctgggccgacaagaggctgcgcgacctggccgggagggtgcggctgagcgtcggctgcgactcgctggccgccgccga

SEQ ID NO: 140 - protein, 581 aa, Corynebacterium humireducens
MARTYAQQLVDALERQGVERIYGVVGDSLNPIVDAVRTSPIEWIHVRNEEAAAFAAGAESLLTGRLAVCAGSCGPGNLHLIQGLYDAHRNGAHVLALASHIPSNQIGTSYFQETHPEQLFAECSGYCEMVNSADQGARVLHHAIQSTMAGQGVSVLVIPGDIATQDAGDDRFLQSTVATGRPVLHPDAREAAALVAAINAADTVTLFCGAGVRDAREQVLALAEKIKAPIGHALGGKMHIQHDNPFDVGMSGLLGYGACHDALHDADLLILLGTDFPYTEFLPTGNVAQVDSDAAHIGRRTTVHHPVVGDVGATLDTILPHLEEKTDRSFLDGMLRKHARTLEKVVEVYTRDVGKHTPIHPEYLAAVLDELAADDAVFTVDTGMCNVWAARYLTPNGRRAQIGSLRHGTMANALPHAIGAQFADRNRQVISLNGDGGLAMLLGELLTVELHDLPVKMVVFNNSSLGMVKLEMLVEGMPQHGTDHGQVDFAAIAAAAGIHSVLIDDPATLREQLAAALAHPGPVLIDVRTDPDALSLPPEITWEMLIGFSRAATRTVLGGGVGEMVHLARTNLRNIGAAGAV

SEQ ID NO: 141 - DNA, 2010 bp, Corynebacterium humireducens
  CDS (301)..(1710): gene pyruvate kinase_1
acgagctgctgtggaacctcctcatcttcgggctgctcatcctcatcgaccgccgcttccgcatcgcaccgggtggactgttcgccctctacgtcgccggttacacgctgggccgtttctggatcgagctcatgcgcgacgattccgccacgatgatcctcggccagcgggtcaacacctgggtctccgccgtggtgttcctcgtctcgatcgcggtattcgtgtggttgcagcgacgtcagcgggctgttgtccgagaaacagagtaggttggtagccgtgtctagacgaaccaagattgtgtgcaccctcggtcctgccgtcgcctccaaggacgcgatcacgcgtctggtggaggacggcatggacgtcgcccgcctgaacttctcccacggtgatcaccccgatcacgagcagaactacaagtgggtccgggaagccaccgatgagaccggccgtgccgtcggcatcctcgctgacctccagggcccgaagatccgcctcggtcgcttcatcgacggtgccaccgtctgggagaccggtgaggtcatccgcatcaccgtggacgatgtcgagggcacgcacgaccgcgtgtccaccacctacaagaacctcgcgcaggacgccaagcccggcgaccgtctgctcgtcgacgacggcaaggtcggcctgacctgcctcgaggtcgacggcaacgacgtcgtctgcgaggtcaccgagggcggccccgtctccaacaacaagggcgtctccctcccgggcatggacatctctgtgccggcgctgtcggagaaggacatcgccgacctcgagttcgccctcaagctgggcgtcgacttcatcgccctgtccttcgtccgctccccggcggacgtcgacctcgtccacgaggtcatggaccgcgtcggccgccacgtgccggtcatcgcgaagctggagaagccggaggccgtccacgccctcgagtccatcgtcctcgccttcgacgccatcatggtcgcccgcggtgacctcggcgtcgaggtgccgctggagcaggtcccgctggtgcagaagcgggccatccagatcgcccgcgagaacgcgaagccggtcattgtcgccacgcagatgctcgactccatgatcgagaactccaccccgacccgcgccgaggcctccgacgtcgccaacgccgtcctcgacggcgccgacgcggtcatgctctccggtgagacctccatcggtgtggacccgcacaacgtcgtgcgcaccatggcccgcatcgtcacccaggccgagaccgacggccacgtgccgccgctgagccatgtcccgcgcaccaagcggggcgtcatctcctactcggcccgtgacatcgccgagcgtctcaacgcccgcgccctggtctgcttcaccacctccggtgacaccgcccgccgtgtcgcccgcctgcactcgcacctgccgctgctggtgttcaccccgcacccggcggtccgttcgcagctggccctcacctggggcgccgagaccttcctctgcgcccaggccctgtccaccgacgacatgatggccgagctggaccgttccctgctcgccatggacgactaccaccgcgacgacatgatggtcgtcgtcgccggcaccccgcccggggtctccggcaacacgaacatgatccacgtccacctgctgggcgaggacacgagttccccgaccggcaggtagccggagaacagaaaaaggagcggcggagaggatcatcctctccgccgctcctgtcgtgtgcggctacttcaccggggtcggctccagcttccacacctcacgcgcgtagtcgttgatggtgcggtcggaggagaaacggcccgaggcgcagatgttcgcccagcacatacgcgcccagtgcaggcggtcggcgtagtcggcggccatgcggtcgcgggtctcgcggtagtcggcgaagtcaccgaggacgtagtagacgtccggggtctcccagccgccgccgtcgagaagcgaggaacg

SEQ ID NO: 142 - protein, 469 aa, Corynebacterium humireducens
VCTLGPAVASKDAITRLVEDGMDVARLNFSHGDHPDHEQNYKWVREATDETGRAVGILADLQGPKIRLGRFIDGATVWETGEVIRITVDDVEGTHDRVSTTYKNLAQDAKPGDRLLVDDGKVGLTCLEVDGNDVVCEVTEGGPVSNNKGVSLPGMDISVPALSEKDIADLEFALKLGVDFIALSFVRSPADVDLVHEVMDRVGRHVPVIAKLEKPEAVHALESIVLAFDAIMVARGDLGVEVPLEQVPLVQKRAIQIARENAKPVIVATQMLDSMIENSTPTRAEASDVANAVLDGADAVMLSGETSIGVDPHNVVRTMARIVTQAETDGHVPPLSHVPRTKRGVISYSARDIAERLNARALVCFTTSGDTARRVARLHSHLPLLVFTPHPAVRSQLALTWGAETFLCAQALSTDDMMAELDRSLLAMDDYHRDDMMVVVAGTPPGVSGNTNMIHVHLLGEDTSSPTGR

SEQ ID NO: 143 - DNA, 2472 bp, Corynebacterium humireducens
  CDS (301)..(2172): gene pyruvate kinase 2
atccagaaccaggacgtcgctctgccggtgtccgcgtacctcgacggcgagtacgggcagaaggacctctacatcggcaccccggcgatcatcaaccgcgccggaatcgcccgcacggtcgagctgaagctcaacgagcacgaggcggagcgcttcgcccactcggctgacacgctgcgcgcgatcaaggaggagttcttccccgccgactgacggcttccccgagatgccgaacctcccgaacacaggcacaatatgggggtatcacccattttgtcgtgcgcgtacgggaggacagccgtggatgccaggctgcaggaactgatcaccgaggtcgacggtctcatcgactgcctcaaggaggtcgaggagcaggtggcccccgcgatcgggcgggtcgccgagaaccaccgccacggcgcggtgaacctcgtccactacgccgagctgcggcagcacgacgtccgcgcggtccagggcggcctggcctccatcggcgccacccgcctgtcgacggcggagccggccgtcctcgcccgtctccacgcggcgcggaacgtgctctccgcctacaacggtgagcagctcaagtacaccggcagcgaggtccgtgacgccttcgccaccgccgacgacatcctcgaggaccacgccctgcagctcctcggctactcctccgaggagacgcactcccgcatcatggtgaccctgccgacggaggcaggcgaggacctcgacctggtccgcggtttcgtcgaggccggcatggagctggcccgcatcaactgcgcccacgacggccccgaggtgtggaggcgcatgatcgacaacgtccacaccgccgcccgcgaggccggccgggagatcaggatcgccatggacctggcgggcccgaaggtccgcaccggggagatcgagccgggcccggaggtcggccgcgcccgcgtcacccgcgaggacaccggcgtggtggtcaccccgtcgaagatctggctcacccccgccgacctggccgacgacgaggtcccgccggtccccgccggactgccgggccgcccgacgctgccgctgcgcgtcgagcgtgactggctggaggccctggagatcggctccgagatcaccttccacgacaaccgcgacgcgaagcgccggttcaccgtcacccgcatcgaggggcagggggtgctgctggaggggcgtcgcaacgcctacgtctccaactccaccctcctcgagaccgactggaccaagacccgcgtctccggcgtcccgccgaccgagcagcgcctgcgtctgagcatcggagacacgctcatcctcaccgacgaccagacccccgccgtcgtcgccccggacgtcaccccgcgcatcggctgcacgctgccggaggccgtcgccgccatcgaggtcgggcagaaggtgcttttcgacgacggctcgatcgccgcccgcgccgtcgacaagcaggtcacggagcagggccaccacgaggtgcgcctcgaggtgacctacgccgggccggagggcaccaagctcgccgcgtacaagggcatcaacctgccggacaccgtcctgccgctgccgagcctcaccgaggaggacatcgaggcgttccgcttcgtggccgagcacggtgacatcgcgaacgtctccttcattcgcgacgccgacgacgtcaacttcgtgctcgacaccctcgagcagatcgcgcaggagtccgacgacccggagcgcgtccgcaacctcggcatcgtgctcaagatcgagacgatccccgcctacgagggcctgtgcagcgtcctgctcgccggcatgcgccaccccaacctcggagtcatgatcgcccgcggcgacctggccgtcgagctcggcttcgagcgcatggccgaggtcccgcgcctcatcgcccagatggcggaggccgcccacgtgcccgtcatcatggccacccaggtgctcgagaacctggccaagtccggcctgccgacccgcgccgagatcaccgacgccgcgtacgccctgcgctccgaggccgtgatgctcaacaagggcccgcacatcaccgacgcgatccgcatcctccacaccctgtcgaccaagctcggccgttcccagcgcaagaaccgccagatgctccgccagatctcgagctggatgcccgggaatgagtagatgaccgccgcacccaggatcatcgcccaccgcggttactccgcgaagtaccccgagttgacgcccgtcgccttcgagcgggcgctggaactgcccgtccacggcatcgagtgcgatgtacgcctcagcctcgacggggaggtggtggtgttgcatgacccgctcatcgaccgcgtcgcggacggctccgggcgggtctcccgcatgacggtggacgccctgcgtgaccacaactacggcaccgccgagctgccgcaggacatgctcaccctcccggagctgctggagatggtggagccg

SEQ ID NO: 144 - protein, 623 aa, Corynebacterium humireducens
VDARLQELITEVDGLIDCLKEVEEQVAPAIGRVAENHRHGAVNLVHYAELRQHDVRAVQGGLASIGATRLSTAEPAVLARLHAARNVLSAYNGEQLKYTGSEVRDAFATADDILEDHALQLLGYSSEETHSRIMVTLPTEAGEDLDLVRGFVEAGMELARINCAHDGPEVWRRMIDNVHTAAREAGREIRIAMDLAGPKVRTGEIEPGPEVGRARVTREDTGVVVTPSKIWLTPADLADDEVPPVPAGLPGRPTLPLRVERDWLEALEIGSEITFHDNRDAKRRFTVTRIEGQGVLLEGRRNAYVSNSTLLETDWTKTRVSGVPPTEQRLRLSIGDTLILTDDQTPAVVAPDVTPRIGCTLPEAVAAIEVGQKVLFDDGSIAARAVDKQVTEQGHHEVRLEVTYAGPEGTKLAAYKGINLPDTVLPLPSLTEEDIEAFRFVAEHGDIANVSFIRDADDVNFVLDTLEQIAQESDDPERVRNLGIVLKIETIPAYEGLCSVLLAGMRHPNLGVMIARGDLAVELGFERMAEVPRLIAQMAEAAHVPVIMATQVLENLAKSGLPTRAEITDAAYALRSEAVMLNKGPHITDAIRILHTLSTKLGRSQRKNRQMLRQISSWMPGNE

SEQ ID NO: 145 - DNA, 1878 bp, Corynebacterium humireducens
  CDS (301)..(1578): gene enolase
ccctgggggcggcgcacctgctgtgtaccaacggtggggacctcagcaccccggagggctggtcccgggcgatctacgcctacaaccgttccgaggcctacctcatcgacgtgcgtgacgcggccgcgtcctatgccctgaaccagccggcccggtgacggccacccctggttgccccctgcaatcgtcgggttgtagcccctggtggcggtttttctggaagaattgtccccggacgcgtgtcgagagcgcgcgacgatgacgaactcccatctcatatggctataggaggccccaaaagtggctgacatcattcacgttttcgcacgagagatcatggattcccgtggcaacccgaccgtcgaggccggcgttgtgctggatgacggaaccctcgccaccgccggtgtcccctccggcgcctccaccggtgtccacgaggcacacgagctgcgtgacggcggcgaccgctacctgggcaagggtgtcctgaaggccgtcgagaacgtcaacgaggagatcgccgacgagctggccggcttcgaggccgatgaccagcgcgccatcgaccaggccatgatccagctggacggcaccgacaacaaggcccgcctgggtgccaacgccatcctgggtgtctccatggctgtggcccgcgccgccgccgagtccgccggcctgccgctctaccgttacgtcggtggcccgaacgcacacgtgctgccggtcccgatgatgaacatcctcaacggtggcgcccacgccgactccggcgtcgacgtccaggagttcatgatcgccccgatcggtgccgagaccttctccgaggctctgcaggtcggcgccgaggtgtaccacaccctgaagtccgtcatccaggagaagggcctgtccaccggcctgggcgacgagggcggtttcgccccgtccgtcgagtccacccgtgcggccctggacctcatcgtcgaggccgtcgagaaggccggctacaagctgggcgacgatgtcgccctggccctggacgtcgcctcctccgagttcttcaaggacggcaagtaccacttcgagggcaaggagctctccgccgaggagatgtccaaggtctacgaggagctcatcaacgagtacccgatcgtctccatcgaggatccgctgcaggaggacgactgggacggctacgtcgccctgaccgccgccatcggtgacaaggtccagctggtcggcgacgacttcttcgtcaccaacccggcccgcctgaaggagggcatcgccaagaaggccgccaactccatcctggtgaaggtcaaccagatcggtaccctcaccgagaccttcgacgccgtcgagatggcccaccgtgcgggctacacctcgatgatgtcccaccgttccggtgagaccgaggacaccaccatcgccgacctggctgtcgcactgaactgcggccagatcaagaccggtgccccggcccgctccgagcgcgtcgccaagtacaaccagctgctgcgcatcgagcaggagctcggcgacgccgccgtctacgccggccgctccgccttcccgcgcttccagaagtaactgacagcgctttccgacgcccccgtgcaccccggtgcacgggggcgtccccgtatccgtgggggaggacaccatggcattcttcggcagacgtagggcacggccccggctggagcccgacttcgtgcacacctggaccggtgagcagctggtccggatcgcggagggcgtcgacctgggcaccctccgggcggtgtacgggcgtctcgacgccacctcacggatccacttcctcttcgacttcggtgccctcttctccgacgggtacctcttcgagctctgggagcggcgtctcctgga

SEQ ID NO: 146 - protein, 425 aa, Corynebacterium humireducens
VADIIHVFAREIMDSRGNPTVEAGVVLDDGTLATAGVPSGASTGVHEAHELRDGGDRYLGKGVLKAVENVNEEIADELAGFEADDQRAIDQAMIQLDGTDNKARLGANAILGVSMAVARAAAESAGLPLYRYVGGPNAHVLPVPMMNILNGGAHADSGVDVQEFMIAPIGAETFSEALQVGAEVYHTLKSVIQEKGLSTGLGDEGGFAPSVESTRAALDLIVEAVEKAGYKLGDDVALALDVASSEFFKDGKYHFEGKELSAEEMSKVYEELINEYPIVSIEDPLQEDDWDGYVALTAAIGDKVQLVGDDFFVTNPARLKEGIAKKAANSILVKVNQIGTLTETFDAVEMAHRAGYTSMMSHRSGETEDTTIADLAVALNCGQIKTGAPARSERVAKYNQLLRIEQELGDAAVYAGRSAFPRFQK

SEQ ID NO: 147 - DNA, 1347 bp, Corynebacterium humireducens
  CDS (301)..(1047): gene gpmA
tcgccgtctccgagggggagacgggagtgcttgtcgacggccacgacaccggcgactgggccgacgccctggagaacctcctcgacgacgacgacacccgcctgcggatggcgaccgacgccgtccagcacgccgcgaacttctcgtggtcgaactccgccgcccagctggcggcggtgtacgccgaggccctgagcctggaggtcgacaactgcccgcaacgccgcgaacgggccgaagggctctaaacggggggtattaatccgcacgctaccggcggaatcgtggcatattggagacatgaccaacggaaagctcattcttcttcgccacgggcagagccagtggaacaaatcgaaccagttcaccggctgggtggacgttgacctgaccgagcagggcgtcgccgaggctgtccgcggcggcgagatgctcaaggaggctggtctcctgccggacatcgtctacacctccctgctgcgtcgtgccatccgcaccgcgaacatcgcgctcaacgccgccgaccgtcactggatcccggtcgtccgcgactggcgtctcaacgagcgccactacggtgcgctgcagggcctggacaaggccgagaccaaggacaagtacggcgacgagcagttcatggcgtggcgtcgttcctacgacaccccgccgccggagctggccgacgacgccgagtactcccagtccgacgatgtgcgctacgccgccctggagaacgcaccgcgtaccgagtgcctcctggacgtcgtcaagcgtttcatcccgtactaccaggaggagatcgagccgcgcgtcaagcgtggcgagaccgtcctcgtcgccgcgcacggcaactccctgcgcgcgctggtcaagcacctggacaacatctcggacgaggacatcgcggccctcaacatcccgaccggcatcccgctggtctacgagctggatgctgacggcaaggtcgtcaacccgggcggcacctacctcgaccccgaggcggccgccgccggtgctgccgctgtcgcggcacagggtggcaagtagcctgtagggcgtgtccgccgttctcgcgttcctgttgggcgtcgccgtcaccggcgtcgcctttccggcgttgaactgggcacgtaagcggatagtccgccaccgttcctcggccacgctcgaggacaaccaggtcaccaccgtcggccaggtcctgcacctggccatccagggttcccccacgggcgtcaccgtcgtcgaccgcggcggtgaggtgatcctgtcgaacgcccgcgcccacgagatggccctcgtccacgaccgcaccctcaacgagcaggtgtggcaggtggcggggga

SEQ ID NO: 148 - protein, 248 aa, Corynebacterium humireducens
MTNGKLILLRHGQSQWNKSNQFTGWVDVDLTEQGVAEAVRGGEMLKEAGLLPDIVYTSLLRRAIRTANIALNAADRHWIPVVRDWRLNERHYGALQGLDKAETKDKYGDEQFMAWRRSYDTPPPELADDAEYSQSDDVRYAALENAPRTECLLDVVKRFIPYYQEEIEPRVKRGETVLVAAHGNSLRALVKHLDNISDEDIAALNIPTGIPLVYELDADGKVVNPGGTYLDPEAAAAGAAAVAAQGGK

SEQ ID NO: 149 - DNA, 1818 bp, Corynebacterium humireducens
  CDS (301)..(1518): gene pgk
cgatccgcacggctccatcttcgacgccggcctgaccaaggtcatcggcgaccaggtcaaggtcgtctcctggtacgacaacgagtggggctacacctgccagctcctgcgcctgaccgagctcgtcgcctccaagctctaggaccgcgaccccgcacttccccggcctccggctgagaccgggggagtgcgcccctgtggcccggggtgtgcctcggcacacgtcgggcctcagggctatccaccccctcagatcagccgcccctttctcatctgaagacaaaagtcaaggagacagccatgaccgtgaagactctgcaggacctgctcgacgagggcgtcgacggccgccacatcctcgtccgctccgacttcaacgtcccgctcaacgacgccggtgagatcaccgacgcgggccgcatcaccgcctccctgcccaccctcaaggcgctcgtcgagggtggcgcgaaggtcatcgtcatggcccacctgggccgcccgaagggcgaggtcaacccgaagtactccctggccccggtcgccgaggccctctccgaggcactcggccagtacgtcgccctcgccggcgacgtcaccggtgaggacgcccacgagcgcgccaacggcctgaccgagggcgacgtcctgctcctcgagaacgtgcgtttcgacgcccgcgagacctccaaggacgaggccgagcgcggcgccttcgccgacgagctcgccgccctggccgccgacaacggcgccttcgtctccgacggtttcggtgtcgtccaccgtgcgcaggcctccgtctacgacgtcgccaagcgtctcccggcctacgccggcaacctggtggagaaggagatctccgtcctggagaagaccgccaccaacccggagtccccgtacgtcgtcgtcctcggcggctccaaggtctccgacaagctgggcgtcatcgaggctctggccggcaaggccgacaagatcatcatcggtggcggcatgtgctacaccttcctcaacgcccagggctacaacacccagaagtccctgctgcaggaggagatgatcgacacctgcaaggacctcctcgagcgtttcggcgacaagatcgtcctcccggtggacctcgtggccgccgccgagttctccgccgactccgagcacaaggtcgtcgccctcgacgagatcccggagggctggctgtccccggacatcggcccggagtccgtcaagaagttcgccgacgtcctcgccacctccaagaccgtcttctggaacggcccgatgggtgtcttcgagatggcaccgttctccaagggcaccgagggcgtcgccaaggccatcatcgacgcgaccgcgaacaacggttccttctccgtcgtcggtggcggcgactccgcagcctccgtccgcgtgctcggcctggacgaggacggcttctcccacatctccaccggcggcggcgcctccctcgagttcctcgagggcaaggagctcccgggcgtttccgtcctggaccgctaagcacttaccacccactctgaaaggagtgccccacccatggcacgcacccccctcatcgccggcaactggaagatgaacctggaccaccaccaggccatcgccaccgtgcagaagctcgacttcgccctgccgaaggagtactacgagaaggtcgacgtcgccgtcaccgtcccgttcaccgacctccgttccgtgcagacgctcgtcgacggggacaagctcaaggtcacctacggtgcccaggacgtctcccggcacgagtccggcgcgtacaccggtgaggtctccgctcagatgctc

SEQ ID NO: 150 - protein, 405 aa, Corynebacterium humireducens
MTVKTLQDLLDEGVDGRHILVRSDFNVPLNDAGEITDAGRITASLPTLKALVEGGAKVIVMAHLGRPKGEVNPKYSLAPVAEALSEALGQYVALAGDVTGEDAHERANGLTEGDVLLLENVRFDARETSKDEAERGAFADELAALAADNGAFVSDGFGVVHRAQASVYDVAKRLPAYAGNLVEKEISVLEKTATNPESPYVVVLGGSKVSDKLGVIEALAGKADKIIIGGGMCYTFLNAQGYNTQKSLLQEEMIDTCKDLLERFGDKIVLPVDLVAAAEFSADSEHKVVALDEIPEGWLSPDIGPESVKKFADVLATSKTVFWNGPMGVFEMAPFSKGTEGVAKAIIDATANNGSFSVVGGGDSAASVRVLGLDEDGFSHISTGGGASLEFLEGKELPGVSVLDR

SEQ ID NO: 151 - DNA, 2058 bp, Corynebacterium humireducens
  CDS (301)..(1758): gene glyceraldehyde_3_phosphate dehydrogenase 1
gcggcgggcgggcgcagcgtggcgagccgggccttcagcggccgcgtcgcccgcggactggaaacggacttcacccggaacaacccggacatcccgccgatctacccctacctcgtgtcgctgcaggccgcggaacggcgggaacgcccgcgggaactggcctactgcctcgtcggggtgggcgtcgagaagctcgggggtggccccgcggcggggattctggctcgactcgcgcctgaacaggcaatttcacgctaaagtcgtggggacgtttccctttactttcggaggtaaaaagcagtgaccgcccacgcgcagcctgagcacaacaactggaacgagaagatcgccctcgctcaggagatgctgccgctgatcggccagctccaccgcaacaacgatgtcgtcgtctccatcttcggacgactgcttgtcggcgcgacggacatcgacatcatcaaggcgcaccgttacgcgcgccgcgtcgccgaccgtgagatgaagctcgatcagaccctcccggtcctgcgcgagctcgtcgacatggacctcggcaccgcctccatcgacctgggccgcctggccaccggcttcgagaagtccggcggcaccgacctgcgtgcctacctggacgagcagctcgccgacatcgtcggcaagcgctccgagaccgagccgcgcgacgtcgtcctctacggcttcggccgcatcggccgcctcctggcccgcatcctcatctcccgtgaggccacctacggcggcgtccgcctccgcgcggtggtggtacgcaagaactccgaggacgacatcgtcaagcgtgcctccctcctgcgccgtgactccgtgcacggcgccttcgacggcacgatcaccgtcgacaaggagaacaacgtcatctgggccaacggcaccaagatccagatcatctactccaactccccggccgaggtcgactacaccgcctacggcatcaatgacgccatcgtggtggacaacaccggcatctggcgcgaccgcgagggactgtcccagcacctgcagtccaagggcgtctcccgcgtcgtcctcaccgccccgggcaagggcgacctgccgaacatcgtctacggcatcaacgacgacatgatcaccgacgacgagcagatcatcaccgccgcctcctgcaccaccaacggcatcaccccggtcctgaaggtcatcaacgaccgctacggcgtcgagcacggtcacgtcgagaccgtccactccttcaccaacgaccagaacctcatcgacaacttccacaagggcacccgccgtggccgtgccgcctccctcaacatggtcctcaccgagaccggcgccgccaaggccgtctccaaggccctgccggagttcgagggcaagctcaccggcaacgccatccgcgtccccaccccgaacgtctccatggcggtgctcaacctcaccctggagaaggaggtcgaccgcgaggaggtcaacaacttcctgcgcaaggtctccctgcactccgacctgcgccagcagatctcctacatcaactccccggaggtcgtgtccaccgacttcgtcggcagcacccacgccggcatcgtcgacggcctggccaccatcgcctccggcaagcacctcgtgctctacgtctggtacgacaacgagttcggctactccaaccaggtcatccgcatcgtcgaggaggtcgccggcgcccgcccggagatctacccgcgtcgcctggaggcctctgagctgaagtagcttttccaggatcagcttcaagctgccgcagcgacaggcccggttctccacgtggagaaccgggcctgtcgcattcaggaggggcggcagcggcacaggcagatgaagaatcgtcgtcggtgtgtccgctcactgcgcctggtgttaggcccgtgctctacacccgcccgctgccggttacggcaatcatggccaggagcaggtgctgaccggtctgacaggcgcctacgctcacccagtcaactgctgactgggacattgacttgaggatgcgtgcttcccggcgtatgtggtcccttg

SEQ ID NO: 152 - protein, 485 aa, Corynebacterium humireducens
VTAHAQPEHNNWNEKIALAQEMLPLIGQLHRNNDVVVSIFGRLLVGATDIDIIKAHRYARRVADREMKLDQTLPVLRELVDMDLGTASIDLGRLATGFEKSGGTDLRAYLDEQLADIVGKRSETEPRDVVLYGFGRIGRLLARILISREATYGGVRLRAVVVRKNSEDDIVKRASLLRRDSVHGAFDGTITVDKENNVIWANGTKIQIIYSNSPAEVDYTAYGINDAIVVDNTGIWRDREGLSQHLQSKGVSRVVLTAPGKGDLPNIVYGINDDMITDDEQIITAASCTTNGITPVLKVINDRYGVEHGHVETVHSFTNDQNLIDNFHKGTRRGRAASLNMVLTETGAAKAVSKALPEFEGKLTGNAIRVPTPNVSMAVLNLTLEKEVDREEVNNFLRKVSLHSDLRQQISYINSPEVVSTDFVGSTHAGIVDGLATIASGKHLVLYVWYDNEFGYSNQVIRIVEEVAGARPEIYPRRLEASELK

SEQ ID NO: 153 - DNA, 1605 bp, Corynebacterium humireducens
  CDS (301)..(1305): gene glyceraldehyde_3_phosphate dehydrogenase 2
gctccattcgggggtgaatcgggcatgtgtgaccgatattattcgccggtgtccggaggaccgcccggtgcccggccgcctgcgaccccccgttgacaacgactttcgggaagtggggcggaccggaatgtgagggcaaacataatcggaaatccgcggatgtctgaaaatgtctgattcttcgctgcacagcggggtaagtgccgctaaactgtcgcttgatgggccgtgaacgccagtcactacgacggacagtgcggtcacatccggacacgtgtactcaaacccgaggagaaaattgtgaccatccgcgttggcatcaacggcttcggccgtatcggccgtaacttctaccgcgcagtcctggagcgcagcgaggccatcgagatcgtcgccgtcaacgacctcaccgacaacaagacgctgtcgaccctcctgaagtacgactccatcctcggcaagctgccgggcgaggtctcgttcgacgacgactccatcacctacgacggcaagaccatcgccgtctccgctgagcgcgacccgaagaacctggactgggccgcccacaacgtggacatcgtcatcgagtccaccggcttcttcaccgacgccgaggcagccaaggcccacatcgaggccggcgccaagaaggtcatcatctccgccccggcctccaacgaggacgcgaccttcgtctacggcgtcaaccaccaggactacgacccggagaaccacaacgtcatctccgccgcatcctgcaccaccaactgcctggccccgatggccaaggtcctcaacgacaagctcggcatcgagcgcggcctgatgaccaccatccacgcctacaccggtgaccagcgtctgcacgacgccccgcacaaggacctgcgccgcgcccgcgccgccgccgtcaacatcgtgcccacctccaccggtgccgccaaggccgtctccctggtcctgccggagctgaagggcaagctggacggctacgcactgcgcgtcccgaccatcaccggttccgccaccgacctcaccttcaccgcctcccgcgagacctctgtcgaggaggtcaacgccttcatcaaggaggccgcgcagggcgagttcggtgagaccctggcctacaccgaggatccgatcgtctccaccgacatcgtcaccgatccgcacggctccatcttcgacgccggcctgaccaaggtcatcggcgaccaggtcaaggtcgtctcctggtacgacaacgagtggggctacacctgccagctcctgcgcctgaccgagctcgtcgcctccaagctctaggaccgcgaccccgcacttccccggcctccggctgagaccgggggagtgcgcccctgtggcccggggtgtgcctcggcacacgtcgggcctcagggctatccaccccctcagatcagccgcccctttctcatctgaagacaaaagtcaaggagacagccatgaccgtgaagactctgcaggacctgctcgacgagggcgtcgacggccgccacatcctcgtccgctccgacttcaacgtcccgctcaacgacgccggtgagatcaccgacgcgggccgcatcaccgcctccctgcccaccc

SEQ ID NO: 154 - protein, 334 aa, Corynebacterium humireducens
VTIRVGINGFGRIGRNFYRAVLERSEAIEIVAVNDLTDNKTLSTLLKYDSILGKLPGEVSFDDDSITYDGKTIAVSAERDPKNLDWAAHNVDIVIESTGFFTDAEAAKAHIEAGAKKVIISAPASNEDATFVYGVNHQDYDPENHNVISAASCTTNCLAPMAKVLNDKLGIERGLMTTIHAYTGDQRLHDAPHKDLRRARAAAVNIVPTSTGAAKAVSLVLPELKGKLDGYALRVPTITGSATDLTFTASRETSVEEVNAFIKEAAQGEFGETLAYTEDPIVSTDIVTDPHGSIFDAGLTKVIGDQVKVVSWYDNEWGYTCQLLRLTELVASKL

SEQ ID NO: 155 - DNA, 1380 bp, Corynebacterium humireducens
  CDS (301)..(1080): gene tpiA
aagaccgtcttctggaacggcccgatgggtgtcttcgagatggcaccgttctccaagggcaccgagggcgtcgccaaggccatcatcgacgcgaccgcgaacaacggttccttctccgtcgtcggtggcggcgactccgcagcctccgtccgcgtgctcggcctggacgaggacggcttctcccacatctccaccggcggcggcgcctccctcgagttcctcgagggcaaggagctcccgggcgtttccgtcctggaccgctaagcacttaccacccactctgaaaggagtgccccacccatggcacgcacccccctcatcgccggcaactggaagatgaacctggaccaccaccaggccatcgccaccgtgcagaagctcgacttcgccctgccgaaggagtactacgagaaggtcgacgtcgccgtcaccgtcccgttcaccgacctccgttccgtgcagacgctcgtcgacggggacaagctcaaggtcacctacggtgcccaggacgtctcccggcacgagtccggcgcgtacaccggtgaggtctccgctcagatgctcgccaagctcggctgcacctgggtcgtcgtcggccactccgagcgccgcgagtaccacaacgagtccgacgagctggtcgccgcgaaggccgctgccgccctccgccacggcatgagcccgatcgtgtgcgtcggcgagccgctggagatccgcgaggccggcacccacgtcgactacgtcgtcgagcagacccgtgcctccctggccggcctgtccgccgaggacctgtccaacaccgtcatcgcctacgagcccgtgtgggccatcggcaccggcaaggtcgcctccgcggccgatgcccaggaggtctgtgcggcgatccgcggtctcgtccgcgagctggccggtgacgaggtcgccgacggcatccgcatcctctacggcggttccgtcaagaccgactcggtcgccgagatcgtcggtcagcccgacgtcgacggtggtctcgtcggtggcgcctcgctcgacggcgaggagttcgccaagctggcggccgccgcggcgtccgtcgtctagcatcacctcatccaccggccccgggcactgaacattcagtgcccggggccggtgtcctttctccggggaatatggtgcgcaatccccacgcacggccgtcatatgcgtcatgatggggaggcgaaccgcatccccgccttcttcgagtacgaacagggagacactcaatgaccgtccgcgatcatctgcaggaagacatccgctacctcggccgtatcctcggccaggtcatcgcggaacaggagggcgaggacgtgttcaacctcgtcgagcacgcccgccagcaggccttcgaggtgg

SEQ ID NO: 156 - protein, 259 aa, Corynebacterium humireducens
MARTPLIAGNWKMNLDHHQAIATVQKLDFALPKEYYEKVDVAVTVPFTDLRSVQTLVDGDKLKVTYGAQDVSRHESGAYTGEVSAQMLAKLGCTWVVVGHSERREYHNESDELVAAKAAAALRHGMSPIVCVGEPLEIREAGTHVDYVVEQTRASLAGLSAEDLSNTVIAYEPVWAIGTGKVASAADAQEVCAAIRGLVRELAGDEVADGIRILYGGSVKTDSVAEIVGQPDVDGGLVGGASLDGEEFAKLAAAAASVV

SEQ ID NO: 157 - DNA, 1632 bp, Corynebacterium humireducens
  CDS (301)..(1332): gene fructose bisphosphate aldolase
ccgactggaccgccgacgcccgcctgccgcacaacttcggcctggcgccgtcgtcactgccggaggccctcggcgtcctgcgtatcgacgaacgcgatctctccgtccagctctccggctggatgctgctggaggccgccgcccgggtgtccacctacgcggagacccagcggtcctgatccccgcgcgcggggcggggggggaggtgacgcgggttttccgccctctgttgcgagcgcgggaggccaaagggaggcatactggtatacggacctgtttgctaacccggaggatcaccctatgcctatcgcgactcccgaaatctacaacgagatgctcgacagggccaaggagggcggctacgccttcccggccatcaactgcacctcctcggagaccatcaacgccgctctccgcggcttcgccgaggccgagtccgacggcatcatccagttctccaccggtggcgccgaattcggctccggtctgtccgtgaagaacaaggtcgccggcgccgtcgccctggcctccttcgcgcatgaggccgccaagcactacggcgtcaacgtcgccctgcacaccgaccactgccagaaggaggtgctcgacgagttcgtgcgcccgctgctggccatctcccaggagcgcgtcgacgccggtgagctcccgctcttccagtcccacatgtgggacggttccgctgtcccgatcgacgagaacctggagatcgcgaaggagctgctggagaagtcccgcaaggcgaacattatcctcgagatcgagatcggtgtcgtcggcggcgaggaggacggtgtcgaggccaaggccggcgccaacctctacaccaccgaggaggacttcgagaagaccatcgacgccatcggcaccggtgagaacggccgctacctgctggccgcgaccttcggcaacgtccacggcgtgtacaagccgggcaacgtgaagctgcgtccggaggtcctgctcgagggccagaaggtggcccgccgcaagctgggtctgggcgacgacgccctgccgttcgacttcgtcttccacggtggctccggctccgagaaggagaagatcgaggaggcgctgcgttacggcaccatcaagatgaacgtcgacacggacacccagtacgcgttcacccgtccgatcgtcacgcacatgttccagaactacgacggcgtcctcaagatcgacggcgaggtgggcaacaagaaggcctacgacccgcgttcctacctgaagaaggccgagcagtcgatggctgagcgcgtcatcgaggcctgccaggacctgcactccgtgggcaagaccgtcaagtagtcttctccacccgaggaaagccccgccctgtgcggggctttctgcgcttagtatcggtgcatggccaaactgagaatcggcaccctggaacgtctccgccagctcgagggctcgttggagtcccgggcgctgcgcgtgcggaagcgcttcttccggatcgtgcaggtcgcggtggccgcgggggtgtcgttctgggtggcgcagtccctcatcgggcatccggtcccgttcttcgcgccgatcacggtgatcatcatcctggggctcaccggcggcgaccgcatccggcgggccctggag

SEQ ID NO: 158 - protein, 343 aa, Corynebacterium humireducens
MPIATPEIYNEMLDRAKEGGYAFPAINCTSSETINAALRGFAEAESDGIIQFSTGGAEFGSGLSVKNKVAGAVALASFAHEAAKHYGVNVALHTDHCQKEVLDEFVRPLLAISQERVDAGELPLFQSHMWDGSAVPIDENLEIAKELLEKSRKANIILEIEIGVVGGEEDGVEAKAGANLYTTEEDFEKTIDAIGTGENGRYLLAATFGNVHGVYKPGNVKLRPEVLLEGQKVARRKLGLGDDALPFDFVFHGGSGSEKEKIEEALRYGTIKMNVDTDTQYAFTRPIVTHMFQNYDGVLKIDGEVGNKKAYDPRSYLKKAEQSMAERVIEACQDLHSVGKTVK

SEQ ID NO: 159 - DNA, 1566 bp, Corynebacterium humireducens
  CDS (301)..(1266): gene 1-phosphofructokinase
agaacaccacaaaatccactagttagcaacgatccagacaggcaacccttgacaaacggacacaatcggacaatgatgatgttgtaacaccacattaaatgtgacttaattcatcattttcataacgtcccgcccgggacagccccggagcgccccgatccccgggtcgcgccccataggattgatccagctcaggacctgttcggtcacccgaccggacaccgctccgggcacgcgtcccccgccacccagcggacacgccgcaacgacacgtttttccgaacggacagggagcccgccgtgattctcaccctcacccccaaccccagcatcgacgcgaccatgcaactggggacgcggctgcgccgcgggctcgtccaccgtccctcctccatctcccaggtggccggcggaaaaggcgtcaacgtcacgcacgccctgaccctcgcggacaaactcagcctcgccctcttcccggcggacggcaacgaccccttcgtcgccctggcccgccagtccgggatccccttccacgccatcccggtgtccgagggcgtccgcatcaacaccaccctcactgaaccggacgggaccaccaccaagatcaacggcctcggcgcgcagatcgagccgcccacccgccgcatcatcgaggagaccgtcgtccgcctcgccgcgaacgcctcctggctggtcatggccggttccctgccgcccggggtccccaccggctggtacacggaactcatcaccaccgtccgcgcgacgcacccggacctgccggtggccgtcgacacgtccgacgccgcgatgatcgccctcggcgagggcttcgaggtcgccgccccgaccctcatcaagcccaacggcatggagctcgggcagctcgtcgaccgtgacggcgagcacctcgaggcggccgccgcccgcggcgacttctccccggtcatcgacgcggcccgcgtcgtcgtcgaccgcggcgtcaacgaggtcctggtgacgctcggcgtcgccggagccgccctcgtcaccgcgcagggcgtctggctcgccacccctcccccggtcgacgtcatgtccaccgtcggcgcgggcgacagctcgctcgccgggtacctcatggcccgcgcggagggcggcagtcccgccgactgcctggcccgcgccgtcgcctacggcaccgccgccaccggcctgcccggcaccaccattccttcccccgcacaactgaatctcgaggaaacccatgtccgtcatatctcctgacctggtacacctggacgccgacctcggcggcacgaccaccgaggtgatcaccgccctggcgggcgtcgtccacgccgccggccgcgccagctccccgcaactgctcgccgacgccgccctcgcccgtgaggcccagaaccccaccggtgtgcccggccgcgtcgccatcccccactgccgttccgccgccgtcgaggtcccgaccctggccttcgcccgactgtcgcgccccgtcgacttcggcggtcccgacggcgacgccgagctcgtcttcctcatcgccgcccccgagggcggcgg

SEQ ID NO: 160 - protein, 321 aa, Corynebacterium humireducens
VILTLTPNPSIDATMQLGTRLRRGLVHRPSSISQVAGGKGVNVTHALTLADKLSLALFPADGNDPFVALARQSGIPFHAIPVSEGVRINTTLTEPDGTTTKINGLGAQIEPPTRRIIEETVVRLAANASWLVMAGSLPPGVPTGWYTELITTVRATHPDLPVAVDTSDAAMIALGEGFEVAAPTLIKPNGMELGQLVDRDGEHLEAAAARGDFSPVIDAARVVVDRGVNEVLVTLGVAGAALVTAQGVWLATPPPVDVMSTVGAGDSSLAGYLMARAEGGSPADCLARAVAYGTAATGLPGTTIPSPAQLNLEETHVRHIS

SEQ ID NO: 161 - DNA, 1632 bp, Corynebacterium humireducens
  CDS (301)..(1332): gene 6-phosphofructokinase
tggtgtgggcgcccaactcggcgacggcgatgcggaccgtcgacatcgcctacatgggtgcggcggccggcgtgtacaacacggggcgccagaccggtgcggtcctcggcgcggccggggtgggggcggcgatgcaggtcggtgcggccacggccgggttcgtgccgggtctcgctctgtcgctgctgctccccgtggccgtcctcggtctggggctggtggcggtcgccttcttcgagaccccgccacacgccgaaccacagggtgccgaacagcgggccggggactaaagtggtctccatgcgacttgccaccctcacctccggcggcgactgccccggcctcaacgccgtcatccgcggcatcgtccgtaccgccagctccgagttcggttccaccgtcgtgggataccaggacggctggcagggcctgctggaggaccgccgcgtcgacctctacgacgacgagcacatcgaccgcatcctcctgcgcggtggcacgatcctgggcaccggtcgtctgcacccggacaagttcaaggcggggctcgaccagatcaagcagaacctggatgacgcgggcatcgacgccctcatcccgatcggcggcgagggcaccctcaagggcgcgaagtggctgtccgacaacggcatcccggtcgtcggcgtgccgaagaccatcgacaacgacgtctacggcaccgactacaccttcggcttcgacaccgccgtcgccgtggccaccgacgccgtcgaccgtctgcacaccaccgccgagtcccacaaccgcatcctcatcgtcgaggtcatgggccgtcacgtcggctggatcgcgctgcacgcgggcatggccggcggcgcgcactacaccgtgatcccggaggtgcccttcgacatctccgagatctgcaagaagatggagcgccgcttccagatgggcgagaagtacggcatcatcgtcgtcgccgagggcgccgcgcccaaggagggcacgatggagctcaagtccggtggcgtcgaccagttcggccacgagatcttcaccggcatcggccagcagatcgccgacgagatccacgcccgcctcggccatgacgtccgcacctccgtcctgggccacatccagcgcggtggcaccccgaccgccttcgaccgcgtcctggccacccgttacggcgtccgcgcgacccgctccgcccaccgcggcgagttcggcacctgcgtggcgctcaagggtgagcggatcgagaacatcacgctggagaaggccgtgggcaccctcaagaccgtgccgatggaccgctggctcaccgcccaggccatgttcggctaggtgcgcgacctccatctggacacctgccggctgctcgtcgtcggcatcaacccgggtctggtgtcggagcgcgtcgacgcgcccttcgcccgcccgggcaaccgtttctggccggcgctccacgccgccggcatcacggagacgcttgtcgacgcccgcgacggcctcaccgccgcccaccacgcggagctgctgcggcggggcctcggcttcacgaacgtcgtgccgcgggccacggcggtggcctccgagctgacccgcgaggagtacctggcgggtggggcggtgctggcggagaag

SEQ ID NO: 162 - protein, 343 aa, Corynebacterium humireducens
MRLATLTSGGDCPGLNAVIRGIVRTASSEFGSTVVGYQDGWQGLLEDRRVDLYDDEHIDRILLRGGTILGTGRLHPDKFKAGLDQIKQNLDDAGIDALIPIGGEGTLKGAKWLSDNGIPVVGVPKTIDNDVYGTDYTFGFDTAVAVATDAVDRLHTTAESHNRILIVEVMGRHVGWIALHAGMAGGAHYTVIPEVPFDISEICKKMERRFQMGEKYGIIVVAEGAAPKEGTMELKSGGVDQFGHEIFTGIGQQIADEIHARLGHDVRTSVLGHIQRGGTPTAFDRVLATRYGVRATRSAHRGEFGTCVALKGERIENITLEKAVGTLKTVPMDRWLTAQAMFG

SEQ ID NO: 163 - DNA, 1932 bp, Corynebacterium humireducens
  CDS (301)..(1632): gene lysA
cggacctctccctgctcacccacgagcgggagggcgacctcatccgcaccctcggcgagttcccgaacgtggtcaaggccgcggcggaactgcgtgagccgcaccgtatcgcccgttatgccgaggaactggccggcgtgttccaccgcttctacgacaactgccagatcctgccgaaggcggacgaagaggccgccccgatccacaccgcccgcctggcgctggctgcggccacccgccagaccctggccaacgcgctcggcctggtcggtgtcaccgccccggagaggatgtaagcgcatgacctcggatttcaacgatctgccggcccacgtctggccgcgcaacgccgcgcgccaggaggacggcgtggtcaccgtcgcgggtgtcccgctgccggagatcgccgaggagttcggtaccccggtcttcgtcgtcgacgaggacgacttccgttcccgctgccaggacatggcccgcgccttcggcggcccggagcacgtccactacgcctccaaggcgttcctcacccgcaccgtcgcccgctgggtcgacgaggaggggctgtcgctcgacgtcgcctcgctcaacgagctgcggatcgcgctggccgccgagttccccgccgcccgcatcaccgcgcacggcaacaacaagggcccgtccttcctgcgggcgtgcgtcaccgagggcgtcggccacgtcgtcctcgactccgagcaggagctcgagcttctcgacgccatcgccgccggcgccggcgtcatccagaaggtgatgatccgcgtcaagccgggcatcgaggcgcacacccacgaggccatcgccacgtcccacgaggaccagaagttcggcttctccctggcctccggctcggcgttccgcgccgcggaggccgccgtccgcgccgagaacctcgagctcgtgggcctgcactgccacgtcggctcccaggtcttcgacgcccggggcttcacgatggccgccgaccgcgtgctgggcctctactcgcagatccaccgcgaactcggcgtgcagctgcccgagctcgatctcggcggcggctacggcatcgcctacaccgaggacgagcagcccctcaacgtcgacgaggtcgcccacgacctgctcaccgccgtggccaagaccgccgcggagctgggcatcgacgcccccgccgtcctcgtcgagccgggccgcgccatcgccggccccggcacggtgacggtctacgaggtcggcaccgtcaaggacgtcaccgtctccgaggacgagaagcgacgctacctctccgtcgacggcggcatgtccgacaacatccgcccggccctctacgacgcgctttacgacgcccgcgtggtcaaccgtttcaccgagggcgaggagatctcctcccgcctcgtcggttcccactgcgagtccggcgacattctcgtccgcgacgcgcgctaccccgacgacatcgtggtcggggacctcatggccgtcgccgcgaccggcgcctacgcctacgccatgtcctcgcgctacaacgccttcggccgtccgccggtcgtcgcggtgcgtgccggcaagacgaagctcatgctgcgccgcgagaccgtcgaggacattctcgcgctggagacgtagaaccgacgcccgggcagggcgtcagtggaagaggcccttgaggctgccggcgtcctccagcagcgccacgacgagcgaggtgtggatggaaccgagcggcacgcccctggcgggcgtcggcgcggtcgacgggtccggggtggaggaacgggtcggcgtcgtggacgactcttcgcggtcgacggtgccggaggctcccgtggcgcacatgcgcagctccgcccggtaggcgtccgcctccgcctgggctcccggggtgcgctcccaggcccgcagccaggcctcgtcggcggccacgga

SEQ ID NO: 164 - protein, 443 aa, Corynebacterium humireducens
MTSDFNDLPAHVWPRNAARQEDGVVTVAGVPLPEIAEEFGTPVFVVDEDDFRSRCQDMARAFGGPEHVHYASKAFLTRTVARWVDEEGLSLDVASLNELRIALAAEFPAARITAHGNNKGPSFLRACVTEGVGHVVLDSEQELELLDAIAAGAGVIQKVMIRVKPGIEAHTHEAIATSHEDQKFGFSLASGSAFRAAEAAVRAENLELVGLHCHVGSQVFDARGFTMAADRVLGLYSQIHRELGVQLPELDLGGGYGIAYTEDEQPLNVDEVAHDLLTAVAKTAAELGIDAPAVLVEPGRAIAGPGTVTVYEVGTVKDVTVSEDEKRRYLSVDGGMSDNIRPALYDALYDARVVNRFTEGEEISSRLVGSHCESGDILVRDARYPDDIVVGDLMAVAATGAYAYAMSSRYNAFGRPPVVAVRAGKTKLMLRRETVEDILALET

SEQ ID NO: 165 - DNA, 1770 bp, Corynebacterium humireducens
  CDS (301)..(1470): gene aat
cgcctacgcgctcaccgtcgtcctggccgccgagaactacccggccgccccggtcaccggtggggtcatcaccggtgacgtcgtgaatgacccgtccaaggtcctccacgccggtaccgcgcgcaacgaggccggcgagctggtctccgccggtggccgcgtgctcaacatcgtgggcgtcggcaagaccctcgaggaggcgcgtgacgacgcctacgccaccatcgagcagatccagctcgagggttccttctaccgcggcgacatcgcactgccggccgtggagggacggatctccctgtgaccggtcggcagctcgtcagcgaccgcggccaggtccagcccttccgcgtcatgcagatgctcgacatcgtgcaccgacgcgcccgcgaggggaagcacaccatcatgctgtgcgccgggcagccctccacgggtgccccggccccggtcctgaccgcggcggaggagtccctccacgcctcgcccctcgggtacaccgaggtggtcggtgaccgcgacctccgggagatcgtcgcggcctggcactccgacacctacggcgtgcacaccagcgcggacaacgtggtgatcaccaccggctcctccggtggcttcgtcgcgtccttcctggccgtgctcgaccacggcgacgccgtcgccctgtcctgccccggttacccggcgtaccgcaacatcctggagtccctcggggcgcgggtggtcaacctcgtgtgcgacgagtcgacccgcttccagccgacggccgcgatgctcgaggcactgccggaggctgacaggccgcgggcggtgatcgtcacctccccgggcaacccctccggcacgaccatcgaccccgcggagctcgagcgcatcgcccgctggtgcgaggacaacgacgccgtgctcatctccgacgaggactaccacggcatgtccttcggccgccccctggccaccgcacgccagttctccgaccgggcgatcgtcgtgggcacgctgtcgaagtactactccatgaccggctggcgcgtcggctggctcatcctccccgacgagctggtcacccccgtggagaacctgcaggcctcgctggcgctctgcccgccggcgatctcgcaggtcgccgggcgtgccgccttcaccccggaggcgcgcgccgaactcgactcccacgtcgagcgctaccgcgccgcccgcgcggtgctgctcgaggagctgccggcggccggtttcaccaccatggcggaacccgacggcgggctctacctgtggctcgacgtctcccacgtcaccgacgactccgaggcctggtgccacgagctcgtcgaggagatcggcgtggccttcgcgccgggcgtcgacttcgacccgatcaacggtcacaagtgggtccgcctcacgctgtgcgccccggaggaggagacccgcgaggcgatccggcgcctcggcgagtacgtgcgtcgctgaccgcgcggcgacctgcggcgcgggggaaacggcccggatccggggactcccgggccacccccgccgctggtcatgcgataatcgggggcgtggctgagaagaagaagatcgcgaacgtcctgtccaaccgctacgcctccgcggagctgagcaacctgtggagcccggagtacaagatcatcctggagcgtcagctctggatcgccgtgatgaaggcgcagaaggatctgggtgtcgacatcccggctgaggccatcgacgcctacgaggccgtcatcgaccgggtcgacctcgagtcga

SEQ ID NO: 166 - protein, 389 aa, Corynebacterium humireducens
VTGRQLVSDRGQVQPFRVMQMLDIVHRRAREGKHTIMLCAGQPSTGAPAPVLTAAEESLHASPLGYTEVVGDRDLREIVAAWHSDTYGVHTSADNVVITTGSSGGFVASFLAVLDHGDAVALSCPGYPAYRNILESLGARVVNLVCDESTRFQPTAAMLEALPEADRPRAVIVTSPGNPSGTTIDPAELERIARWCEDNDAVLISDEDYHGMSFGRPLATARQFSDRAIVVGTLSKYYSMTGWRVGWLILPDELVTPVENLQASLALCPPAISQVAGRAAFTPEARAELDSHVERYRAARAVLLEELPAAGFTTMAEPDGGLYLWLDVSHVTDDSEAWCHELVEEIGVAFAPGVDFDPINGHKWVRLTLCAPEEETREAIRRLGEYVRR

SEQ ID NO: 167 - DNA, 1281 bp, Corynebacterium humireducens
  CDS (301)..(981): gene lysE
gaaggcgatcacctggatgccgtagcccaccgccgccgggtcgaggcgcgtgtggaagccggtgatcacgcccccgttctccagcgcccgcagccgccgcaggcaggtgcttgacgacgcccccgtatgatgcgccagttctgcggcggtgatgcgtgcattgttctggatcagtgacagaatcatgcggtcaatgtcgtccatacgccggattctgtcacacgtgcagtcccggcgtcccccggtgaatgaaaagttcaggagtatcggccgcggcgccgggcgggcacgataccgggcatggacatcacggacctcctgagcttctgggcggtcagcctcctgctgatcgtcaccccgggccccgactgggcgttcgtgctcgggcacgctttccgacgccgccccctcgccccgccccttctcggcatcggcctgggctacctcggcctgaccaccgtggtggccggcggcctcggggcgctcgtggcccgtcaccccgcgctgctcacgctcgtcaccgtcgccggtgtcctggtgctcctgcgtctcggctggcagatgatgcgcgcggcgctggccgggcccgtcacggtggaggtggacaccgcggacccggctgtcccggaggggccggccggcgggggagtggcgacgctgacgcgcccgcaggtgggcgtcgagaagcacgcggtggtcaccggggccgcggtgagtggcctcaaccccaaggggctcatgctgttcatcgcgctgctgccccagttcgtgggcgcggaggcgacgtggccggtgtggacgcagatgttcgtcctcggactggtgttcatcgcctcggcgaccgtgttctacgcgctgctcggcgttttcgccgggcgggtgctggcgggctcggagcgggcctcccggatcctcaccggcgtggccggcggggcgatgatgtgtgtcgcggcagggatgctcgcgcagcacctcctctgatgggggtagttgagtaggggcattcatcgggtgcgagttccgcgcctcccgatgaatgcccctgctcggataccctcctactccacgtgcgccggcgtcgacggcgacaccagcggcatcggcgcgtactcggcacgcagctcgcgcagcttccgggcgtgctcggagaggcggacgtcctcggtggtacgggggacgaactggcgggcgggcagggcgttgccgtcggcgtccgtcgccaggtaggtgacggtggcgtggatggcggtctgcaggttctcgcggcccccgcgcgggttg

SEQ ID NO: 168 - protein, 226 aa, Corynebacterium humireducens
MDITDLLSFWAVSLLLIVTPGPDWAFVLGHAFRRRPLAPPLLGIGLGYLGLTTVVAGGLGALVARHPALLTLVTVAGVLVLLRLGWQMMRAALAGPVTVEVDTADPAVPEGPAGGGVATLTRPQVGVEKHAVVTGAAVSGLNPKGLMLFIALLPQFVGAEATWPVWTQMFVLGLVFIASATVFYALLGVFAGRVLAGSERASRILTGVAGGAMMCVAAGMLAQHLL

SEQ ID NO: 169 - DNA, 1347 bp, Corynebacterium humireducens
  CDS (301)..(1047): gene dapB
ccggtgccgaaggagtcgagccaggtgcgcagggagttgcggttgactccgagatcggaggcgatcgcgttgatcgttgctccgggagtcgactcgtacaacgccactgcgtcacgcttgaactgctcggtgtaggtcttgcgtggcatggtggaaaggtacctcacttccccagcgaaatgctggtttcagcgtgtccaccatcaaggggtcaggtccgctggtgatgttgatgcgcatgcaacgattctatgcgcctagactggggcactgaatctttcaggaactcaaggaggaaccatggcgatcaaggtgggagtgctcggcgcgaagggccgtgtcggctcggcggtgtgcgagggcgtcaacggggcggagggcctcgagctcgtcgcgcaggtcgatcaggacgatgacctgcagctgcttctcgacgccggggcggaggtcgtcgtcgacttcaccactccgggttccgtgatgggcaacctggagttctgcatcgccaacggcatccacgcggtggtcggcaccaccggcttcgacgaggagcgcctcgcgcaggtccgtgagtggtgtgccgccgagggggcgggcaacgtcctcatcgccccgaacttcgcgatctctgcagtgctggccatggagttcgcgcggcaggccgcccgcttcttcgactccgccgaggtcgtcgagtaccaccacccctacaagctggacgccccctccggcaccgcgatccacaccgcgcagggcatcgccgccgcccgccgggaggccggcctcggccccatcccggatgccaccgagcagaccctcgagggtgcccgcggcgccgacgtcgacggcgtgcgtgtccacggcgtgcgcatgaccggcatggtcgcccacgaggacatcatcttcggtgcccagggccagtccctgaccatccgccaggactcctacgaccgcacctccttcgtgccgggcgtgctcctcggtgtccgtgagatcgcgaaccacgacggcctgaccgtggggctcgacagctacctgggactctagatggccaagcccgtcgacctggacgtccagctcatcgcggccacgcagttcaccccgcccgccggggtcgactgggaggccgacgacaccgccaccggcgccgaggcgctcgtcgagttcgcgggccgcgcctgctacgagaccttcgacaaacccaacccgcgcaccgcggccaacgacgcctacctccgccacatcatggaggtcggacacaccgcactgctcgagcacgccaccgcgacgctctacatccgcggcatctcccgctccgccacccacgagctggtccgccaccgcaac

SEQ ID NO: 170 - protein, 248 aa, Corynebacterium humireducens
MAIKVGVLGAKGRVGSAVCEGVNGAEGLELVAQVDQDDDLQLLLDAGAEVVVDFTTPGSVMGNLEFCIANGIHAVVGTTGFDEERLAQVREWCAAEGAGNVLIAPNFAISAVLAMEFARQAARFFDSAEVVEYHHPYKLDAPSGTAIHTAQGIAAARREAGLGPIPDATEQTLEGARGADVDGVRVHGVRMTGMVAHEDIIFGAQGQSLTIRQDSYDRTSFVPGVLLGVREIANHDGLTVGLDSYLGL

SEQ ID NO: 171 - DNA, 2145 bp, Corynebacterium humireducens
  CDS (301)..(1845): gene glucose-6-phosphate dehydrogenase
cgaccctctacgtcaccgagctggccggcccggagaccgtcaacaccatgccggagccgaccatcgacgccgtgctcgagcagggtggcctccacggcgacaccctgagcggcaccgcggacgacgcgcaggccgtcttcgagcagctggtgcaggtcggcatcgacatggaggacgtcttcgcggtgctggagcgcgagggcgtcgagaagttcgtgtcctcctggtccgagctgctcgactccatggagtcccgactgcgctagcagtcccctccccgacaggaaaggacctgagcgcatgcccctccccgtgaccggcaccgacgcctggatcaacccgctgcggaacaccgtcgacaagcggctgccccgcatcgccggcccctccggcatggtgatcttcggcgtgaccggtgacctggcccgcaagaagctgctcccggccatctacgacctggccaaccgtggcctcctgccggccggtttcaccctcatcggtttcggccgtcgtccctggagcaaacccgagttcgaggagtacgtgcgggaggccgtcgagagcggcgcccgcaccgagttccgcgaacacgtgtgggagcggctggccgagggcatgcacttcgtcgagggcaacttcgacgacgagggcttcgaccgcctcgccgccaccctcgccgagatggacacctcccgcggcacggcgggcaactgggccttctacctgtcggtcccgccggacttcttcaccgccgtctgccaccagctggagcgctccggcctggcggaggccggtgaggagtcgtggcgtcgcgtgatcatcgagaagcccttcggccacgaccaggacacggcccgggagctcaaccgggtggtcaacgccgtcttcccggaggagtcggtgttccgcatcgaccactacctgggcaaggagacggtgcagaacatcctggcgctgcgcttcgccaaccagctcttcgacccgatctggaacgcgcactacgtcgaccacgtgcagatcaccatggccgaggacatcggtctcggtggtcgggccggctactacgacggcatcggcgccgcccgcgacgtcatgcagaaccacctcctccagctcctggcgctggtggccatggaggagcccatcgccttcgacccggctgagctgcaggcggagaaggtcaaggtcctgcgcgcgaccaaccccgtcttcccgctgaacaagaccaccgcccgtggccagtacgcggcgggctggcagggctcgcacaaggtgcgtggcctgcgtgaggaggagggtttcgacccggactccaccacggagacctacgccgcctgcaccctggagatcaactcccgccgctgggcgggcgtgcccttctacctgcggaccggcaagcgcctggggcgccgcgtcacggagatcgccctcgtgttcaaggaggcgccgcaccagcccttcctcgaggggcagacgtcctcgctggggcagaacgcgatcgtcatccgcgtccagcccgacgagggcgtgctcatgcgcttcggctccaaggtgcccggctccgcgatggaggtccgtgacgtcaacatggacttctcctacgcggaggccttcaccgaggcgtccccggaggcctatgagcggctcatcctcgatgcgcttctcgacgagtcctcgctcttccccaccaacgaggaggtcgagctctcctgggcgatcctggacccgatcctcgagttctgggctgagaagggccagcccgaggagtacgagtccggcacctgggggcccgcctccgccgaccgcatgctggaacggaccggccgcgcctggcgccgcccctgacctggaagggacccgacttgaagatcgaactgccggacaccgacacccggaacatcgccgccagcctgctcgaggcccgggagcacaactcccagaccaccgggcgggtgctcaccctcatcgtcgtcgccgcgctcgacgacgacgtcgaccacatcatctccgtcacccgcgacgcctcccacgagcaccccgcccgtgtgctggtgctgctcaccggccgggaggacgctgactcgcgtctcgacgccgaggtgcgcgtcggcggtcacgccggcgcctcggagatggtcatcatgc

SEQ ID NO: 172 - protein, 514 aa, Corynebacterium humireducens
MPLPVTGTDAWINPLRNTVDKRLPRIAGPSGMVIFGVTGDLARKKLLPAIYDLANRGLLPAGFTLIGFGRRPWSKPEFEEYVREAVESGARTEFREHVWERLAEGMHFVEGNFDDEGFDRLAATLAEMDTSRGTAGNWAFYLSVPPDFFTAVCHQLERSGLAEAGEESWRRVIIEKPFGHDQDTARELNRVVNAVFPEESVFRIDHYLGKETVQNILALRFANQLFDPIWNAHYVDHVQITMAEDIGLGGRAGYYDGIGAARDVMQNHLLQLLALVAMEEPIAFDPAELQAEKVKVLRATNPVFPLNKTTARGQYAAGWQGSHKVRGLREEEGFDPDSTTETYAACTLEINSRRWAGVPFYLRTGKRLGRRVTEIALVFKEAPHQPFLEGQTSSLGQNAIVIRVQPDEGVLMRFGSKVPGSAMEVRDVNMDFSYAEAFTEASPEAYERLILDALLDESSLFPTNEEVELSWAILDPILEFWAEKGQPEEYESGTWGPASADRMLERTGRAWRRP

SEQ ID NO: 173 - DNA, 2055 bp, Corynebacterium humireducens
  CDS (301)..(1755): gene gnd
aaggctgcccacggactcggccagcgcgcagaacacgcccccgttgaccaggccgacgggctgccggtgctggtcccccacctcgaggcgggcgcggacgcggccgtcggcgatctgcgtgtagacgatcccgaggtgggcgtcgaggccgacgttgcggtcgttgagctgcgcgagctgcgcggcgtcgagggccttgcctgtcccggcgaggcggaagaggtcggtgaaactgtaggtctcggtcatgagtgccgactctactgacccttcgaaaatggtgtgtctaaactctgtgccatgacctcccctgagaatctcgcccagatcggcgtcgtcggactcgccgtcatgggttccaacctggcccgcaacttcgcccgcaacggccacaccgtcgccgtgtacaaccgttcccccgagaagacccgcgacctcatcgccgagcacggtgacgagggcaccttcctcgcctccgagaccgtcgaggacttcgtcgcctccctcgagcgcccgcgtaaggcgatcatcatggtccaggccggcgcggccaccgacgcggtgatcaaccagctggccgacgccatggaggacggcgacatcatcatcgacggcggcaacgccctctacagcgacaccatccgccgggagcgggagatggccgagcgcaaccgtcacttcgtcggcgccggcatctccggcggcgaggagggggccctcaacggcccgtcgatcatgccgggtggcccgaaggagtcctgggagaccctcggcccgctgctggagtccgtcgctgccgtcgtcgacggcaccccgtgtgtcacgcacatcggcccggacggtgcgggccacttcgtcaagatggtccacaacggcatcgagtacgccgacatgcaggtcatcggcgaggcgtaccagctgctgcgctacggcgcgggcatgagcccggccgagatctccgaggtcttccgcgagtggaactccggcgacctcgactcctacctcatcgagatcaccgccgaggtcctcgcgcaggtcgacgccgagacggggaagccgctcatcgacgtcatcgtcgacgccgccggccagaagggcaccggccgctggaccgtcaaggccgccctcgacctgggcatcccggtcaccggcatcggcgaggccgtcttcgcccgcgccctgtcctcctccctcgagcagcgtgccgccgcgcagggcgtgctgcccgccggtgagctcgccaccttcgagtccctgggtctggaccgcgacgccttcatcgaggacgtccgccgcgccctctacgcctccaagctggtcgcctacgcgcagggcttcgacgagatccgggccggctccgccgagcacgcctgggacgtcgacccccgcgacctggccaccatctggcggggcggctgcatcatccgcgccaagttcctcaaccgcatcgtcgaggcctacgacgccgacccgcagctgccgtccctgcttctcgacgcctacttcctcgacgagctgcgcgacctcatcgactcctggcgtcgcgtcatcgtcgccgccacccagctgggcctgccggtgccggtgttcgcgtcctccctgtcctactacgactcgctgcgcgccgagcgtctgccggccgccgtgatccagggccagcgtgactacttcggtgcgcacacctacgggcgcgtcgacaagccgggtgccttccacaccctgtggtccggggaccgcagcgagatcgaggtgtaatgcccgtgtgggcgaggatctcccgtttcctgccggcggcggccatcgtggtggtgaccgccagggcagtgcaggaggtccttgcccacgggcagtgggcggtgtggcggctgtcgcggcgggagacccgcctgttcgtcgaggtattccggacggtgctgggcctgttcctcgtcgtcggcctcacccgggtggtcgccgcgcctccctcccccacggaactggccggatgggcgctcaccttggggttcctgtggatcctcaccctcacggagacggaacccggccccgaccccgagc

SEQ ID NO: 174 - protein, 484 aa, Corynebacterium humireducens
MTSPENLAQIGVVGLAVMGSNLARNFARNGHTVAVYNRSPEKTRDLIAEHGDEGTFLASETVEDFVASLERPRKAIIMVQAGAATDAVINQLADAMEDGDIIIDGGNALYSDTIRREREMAERNRHFVGAGISGGEEGALNGPSIMPGGPKESWETLGPLLESVAAVVDGTPCVTHIGPDGAGHFVKMVHNGIEYADMQVIGEAYQLLRYGAGMSPAEISEVFREWNSGDLDSYLIEITAEVLAQVDAETGKPLIDVIVDAAGQKGTGRWTVKAALDLGIPVTGIGEAVFARALSSSLEQRAAAQGVLPAGELATFESLGLDRDAFIEDVRRALYASKLVAYAQGFDEIRAGSAEHAWDVDPRDLATIWRGGCIIRAKFLNRIVEAYDADPQLPSLLLDAYFLDELRDLIDSWRRVIVAATQLGLPVPVFASSLSYYDSLRAERLPAAVIQGQRDYFGAHTYGRVDKPGAFHTLWSGDRSEIEV

SEQ ID NO: 175 - DNA, 2103 bp, Corynebacterium humireducens
  CDS (301)..(1803): gene mqo
cgagaatgtcctcataccagtcggagaaggcgggaacgctcatgatgaccacactagtgggggtacgggggcagggggcgggggagtgaggggcgtcgataagttcgtgttttccggaccttcgtcacacccccgtgaacctaaggcgtaaggttgatgtttaccggacaaggggagcggatctgtgccgaggacgtcagagtccgcacccggaattgtcctgcccaccgggagtagtgccgacacccggtgtgggccatgactggccagaaccttcgacgacgaatgaggtaatgcaaggtgtccaccgaaaacaagaacgctcccaaggtcactgacgaggtcgatgtcgccctcgtcggcgcgggtgtcatgagcgccaccctgggtgcgatgatccgcgagctcgagccgagctggtcccagatgatcttcgagcgcctggacggccccgcccaggagtcctcctccccgtggaacaacgccggtaccggccactccgcactctgcgagctgaactacacccccgaggtcaacggcaagatcgaggtggccaaggccatcggcatcaacgagaagttccaggtctcccgccagttctggtcccaccagatcgaccacggcgtgctggacgaccccaaggagtggatcaaccccgtcgcccacctggccttcgcccagggcgacgaccaggtcgactacctcaagcgccgccacgaggcgctggccgacaacatcctcttcccgggcatggagtgggtcgaggacgacgccaagttcgccgagcgcctcccggtcatgtccgagggccgtgacttcgccgccgagaaggtcgcctactccggcaccgacatcggcaccgacgtcaacttcggtgccctgaccgagcagttcctcactgccgccgaggcctccggcacggagatccgctacggccacgaggtcaagaacatcaagaaggacggtggcaagtggaagatcaccgtcaagaacgtccacacgggtgacacctccgtggtcaaggccaagttcgtgttcgtcggcgccggcggctacgccctcgacctgctgcgcaaggcaggcgtcccggaggtcagcggttacgccggcttcccggtgtccggcctgtggctgcgctgcaccaacgaggagctgatcaaccagcacgacgccaaggtctacggcaaggccaaggtcggtgccccgccgatgtccgtcccgcaccttgacacccgcgtcatcgacggcaagaagggcctcctgttcggcccctacggcggctggagcccgaagttcctcaaggagggttcgtacctcgacctgttcaagtcgatccgcctggacaacctcccgtcctacctcggtgtcgccgcccaggagttcgccctgaccaagtacctcatcaccgaggtggcgaaggacttcgagaagcgcctcgtcgacctgcgtgactacgtcccgtccgccaaggccgaggactgggagaccgtggtcgccggtcagcgcgtccaggtgatcaagccggcccgcgcgccgcgcttcggctccctcgagttcggcaccgccctgatcaacagcaccgacggctccatcgccggcctgctgggtgcctccccgggtgcctccatcgccccggccgccatgctcgagctcgtcgagcgctgcttcggtgaccgcatgatccagtggggcccgaagctcaaggagatgatcccgtcctacggcaccaagctgggcgacgacgagaagatgttcaacgagctctgggactacacccagaagaccctgaagctcgagaagtagttccactgtgagggccgcgaccaccgggtcgcggccttcgccgattccgtaggctggtggccatgcaacgcatcgtgcccaccatctggttcaaccggaacgccgacgaggccgccgagttctacgccgacgtcttccccgacacgcttgtcgacgcccgcgtcccccaccccgaatccggcgagaccctcaccgtcgacgtgctcatcgacggctaccgcgtcaccctcctcaacggtgggccggagttcggcccgacccccgcgatcagcttcttcgtcaacttcgacccctcccgca

SEQ ID NO: 176 - protein, 500 aa, Corynebacterium humireducens
VSTENKNAPKVTDEVDVALVGAGVMSATLGAMIRELEPSWSQMIFERLDGPAQESSSPWNNAGTGHSALCELNYTPEVNGKIEVAKAIGINEKFQVSRQFWSHQIDHGVLDDPKEWINPVAHLAFAQGDDQVDYLKRRHEALADNILFPGMEWVEDDAKFAERLPVMSEGRDFAAEKVAYSGTDIGTDVNFGALTEQFLTAAEASGTEIRYGHEVKNIKKDGGKWKITVKNVHTGDTSVVKAKFVFVGAGGYALDLLRKAGVPEVSGYAGFPVSGLWLRCTNEELINQHDAKVYGKAKVGAPPMSVPHLDTRVIDGKKGLLFGPYGGWSPKFLKEGSYLDLFKSIRLDNLPSYLGVAAQEFALTKYLITEVAKDFEKRLVDLRDYVPSAKAEDWETVVAGQRVQVIKPARAPRFGSLEFGTALINSTDGSIAGLLGASPGASIAPAAMLELVERCFGDRMIQWGPKLKEMIPSYGTKLGDDEKMFNELWDYTQKTLKLEK

SEQ ID NO: 177 - DNA, 3357 bp, Corynebacterium humireducens
  CDS (301)..(3057): gene aceE
gtgggagatgaccctcgttgccgccccttgtgggctggttgtgacctcgggggtgggagccggggtttgcaatctccgccacacacctcgcggagaggcgggacaggcctgcgacaaggggcgatgggacgtcgataagcggaacgccggacccgttcatcttcgcaagctttacaggaatgcagaactacgttggccaatgaaaacacgtatcctggactggacactcgggcctgtccggaccaccttgccggcgggcccgttgctccaccacgacacccagaaacctggaggcacatcatggcagatgacctgaacgcgaacggccgcaagggcaactcccactacccggcgatccgcgacggcgtcgcgtcctacctcaaagacaccgacccggaggagacccaggagtggatggactccctcgacggtctcctcgcggagaaggacccggcccgcgcccgctacctcatgctccgcatgctggagcgcgcggccctcaagcgtgtcccgctgccgaacctgacctccacagacttcgtcaacacgatccccaccaccatggagccggagttcccgggtgacgaggagatggagaagcgctaccgccgctggatgcgctggaacgccgccatcatggtgcaccgcgcccagcgccccggcatcggcgtcggcggccacatctccacctacgcctccgccgccccgctctacgaggtcggcttcaatcacttctggcgcggcaaggaccacccgggcggcggcgaccagatcttcttccagggccacgcctcccccggcatctacgcccgcgccttcctcgaggggcgcctgagcgaggacgacctcgacggcttccgccaggaggtctcccgcggtgagggcaacggcatcccgtcctacccgcacccgcacggcatgcctgatttctgggagttcccgaccgtctccatgggactgggcccgatggacgcgatctaccaggcacgtttcaaccgttacctgcacaaccgcggcatcaaggacacctccgaccagcacgtgtgggccttcctcggcgacggcgagatggacgagccggagtcccgcggcctcatccagcacgccgcgctgaacaacctggacaacctcaccttcgtggtcaactgcaacctgcagcgtctcgacggcccggtccgcggcaacacgcagatcatccaggagctcgagtccttcttccggggtgccggctggtccgtcatcaaggtcatctggggccgcgagtgggacgccctgctggagaaggacgagtccggcgcgctggtcaacgtcatgaacaccaccccggacggtgactaccagaccttcaaggccaacgacggcgcctacgtccgcgagcacttcttcggccgcgacgagcgcaccgccaaactcgtcgaggacatgaccgacgaggagatctgggccctgccgcgcggtggccacgactaccgcaaggtccacgccgcctacaagcgggcgctggagaccaaggaccgcccgaccgtcatcctcgcgttcaccatcaagggctacggcctgggccacaacttcgagggccgcaacgcgacgcaccagatgaagaagctcgccgccgaggacctgaagaacttccgcgacaagcagtccatcccgatcccggacgaggtcctcgaggccgacccgtacctgccgccgtactaccacccgggcgaggacgccccggagatccagtacatgaagaagcgtcgtcaggagctgggcggtttcatcccggagcgtcgccagacctacaccccgctgcaggtcccggacatcgagaagctgcgcagcgtgcgcaagggctccggcaagcaggaggtcgcctccaccatggcgctcgtgcgtgccttcaaggagctcatgcgtgacaaggagctgggccgccgcgtcgtgccgatcatcccggacgaggcccgcaccttcggcctcgactcctggttcccgaccctgaagatctacaacccgcacggccagaactacgtgccggtcgaccatgacctcatgctgtcctaccgggaggccaccgacggccagatcctccacgagggcatcaacgaggccggttccgtcgcgtccttcatggccgccggcacctcctacgccacccacggcgaagcgatgatcccgctgtacatcttctactcgatgttcggtttccagcgcaccggcgacggcatctgggccgccgccgaccagatggcccgtggcttcctcatcggcgccaccgccggccgcaccaccctgacgggtgagggcctgcagcacatggacggccactcgcagatcctcgcctccacgaacccgggcgtcgtgtcctacgacccggcgttcgcctacgagatcgcgcacctgctccatgagggcatcgaccgcatgtacggcccgggccgcggtgagaacgtcatctactacctcaccgtgtacaacgagccggtcccgcagccggccgagccggagaacctcgacgtcgagggcctgcacaagggcatgtacctgttctcccgcgcggaggagctcgaggtcgaggacggccacgaggcctccatcctggcctccggcatcggcatgcagtgggcgctcaaggcccagcagatgctggccgaggagtacaacgtgcgtgccaacgtcttctccgtcacctcctgggtcgagctggcccgcgagggtgcggcgaagaacaaggagcagctgcgcaacccggccgcagagatcgaggaggccttcgccaccaggcagctgaagcaggtcgacggcggcaccttcgtggccgtctccgacttcgcgaccgacctgcaggagcagatccgcgcctacgtcccgggcgagtacatcgtcctgggcgccgacggcttcggcttctccgacacccgtccggccgcccgccgcttcttcaacatcgacgccgagtccatcgtcgtcgcggtcctcatgggcctggcccgcgagggcaagatcgacatctctgtggcccagcaggccgccgagaagtaccagctggacgatccgaccgctgtgtaactgatcccccggtcaaggccctgctccggcagggccttgctgctttcccgcttgtcgacgcccctctcactccctgttgaggtaccgcggccaggaggtgtcgcgggtggccagcgagatctccaccgcggtgtcgagctccgctgccaggggctcgggcagcttgtgccggagcgcgtcgccgaggcgcgcgatgacctccaggcgcagcaggttgcgggtctccgtgatgtagatgcgcgggtaccgggtggccagctcgacctcggaggggtcggcgggcccgccgtacatctcgac

SEQ ID NO: 178 - protein, 918 aa, Corynebacterium humireducens
MADDLNANGRKGNSHYPAIRDGVASYLKDTDPEETQEWMDSLDGLLAEKDPARARYLMLRMLERAALKRVPLPNLTSTDFVNTIPTTMEPEFPGDEEMEKRYRRWMRWNAAIMVHRAQRPGIGVGGHISTYASAAPLYEVGFNHFWRGKDHPGGGDQIFFQGHASPGIYARAFLEGRLSEDDLDGFRQEVSRGEGNGIPSYPHPHGMPDFWEFPTVSMGLGPMDAIYQARFNRYLHNRGIKDTSDQHVWAFLGDGEMDEPESRGLIQHAALNNLDNLTFVVNCNLQRLDGPVRGNTQIIQELESFFRGAGWSVIKVIWGREWDALLEKDESGALVNVMNTTPDGDYQTFKANDGAYVREHFFGRDERTAKLVEDMTDEEIWALPRGGHDYRKVHAAYKRALETKDRPTVILAFTIKGYGLGHNFEGRNATHQMKKLAAEDLKNFRDKQSIPIPDEVLEADPYLPPYYHPGEDAPEIQYMKKRRQELGGFIPERRQTYTPLQVPDIEKLRSVRKGSGKQEVASTMALVRAFKELMRDKELGRRVVPIIPDEARTFGLDSWFPTLKIYNPHGQNYVPVDHDLMLSYREATDGQILHEGINEAGSVASFMAAGTSYATHGEAMIPLYIFYSMFGFQRTGDGIWAAADQMARGFLIGATAGRTTLTGEGLQHMDGHSQILASTNPGVVSYDPAFAYEIAHLLHEGIDRMYGPGRGENVIYYLTVYNEPVPQPAEPENLDVEGLHKGMYLFSRAEELEVEDGHEASILASGIGMQWALKAQQMLAEEYNVRANVFSVTSWVELAREGAAKNKEQLRNPAAEIEEAFATRQLKQVDGGTFVAVSDFATDLQEQIRAYVPGEYIVLGADGFGFSDTRPAARRFFNIDAESIVVAVLMGLAREGKIDISVAQQAAEKYQLDDPTAV

SEQ ID NO: 179 - DNA, 1752 bp, Corynebacterium humireducens; identical to SEQ ID NO: 135
  CDS (301)..(1452): gene gltA

SEQ ID NO: 180 - protein, 383 aa, Corynebacterium humireducens; identical to SEQ ID NO: 136

SEQ ID NO: 181 - DNA, 1578 bp, Corynebacterium humireducens
  CDS (301)..(1278): gene mdh
gaacatgcggggtcgtccctccgggggcacgggtcggggtggaagggtctggaagggggcggtgccggcgggtctgtgcgggccgcaaccggcgctgtgatccatcgtgcctgatgtatcggtcggtggtggggcggtgcggctgagaagatgctggaccacccgatgtagcgacgttcttccagcggaaacagccggatctccggcgaggttacgcccatccgggggtggcggctcggaacggtctttgaggctagactcgcaggcgttgatgcattagaccgctcgaaaggatcccgcatgacccagaaccccgtgaagatcgccgtcaccggtgccgccggcaacatcgcctactccctcctgtggcgcatcgccgcaggtgacgtctacggccgcgacaccccgatcgagctcaccctcctcgagatcccggccgccgtacgcggcgccgagggcgtggccatggagctcaacgactccgccttccccctcctgcgcaacatcaccgtcaccgacagcgccgacgtcgccttcgacggcgccaacgccgccttccttgtcggcgcgaagccgcgcggtgcaggcgaggagcgcgccgacctgctgaagaacaacggcggcatcttcggcccgcagggcagggccatcaacgaccgcgccgcggacgacgtccgcgtgctcgtcgtcggcaacccggccaacaccaacgccctgatcgcccagcgcaacgccccggacgtcccggccgagcgtttcaccgcgctgatgcgcctggaccacagccgtgcgctgtcccagctggccgagaagctcggcgtgctcaccaccgacttcgagaacgtcgtcgtgtggggcaaccactccgcgacccagttcccggacgtgaccttcgccaccgtcaagggtgagccggtcatcgagaagatcgaccatgactggtacgtcaacgagttcatcccgcgcgtcgcgaagcgtggcgccgagatcatcgaggtccgcggcaagtcctccgccgcctccgccgcctccgccgcggtggaccacatgcgtgactgggtccagggcactgagcggtgggcctccgccgccctgccgtccgacggctcctacggcatcgacgagggtctcgtcgccggcctgccgaccgtctcccgcaacggctcctgggagatcgtccagggcctcgagctcaacgacttccagcgcgagatgatcgcccggaacgtcgcggagctcaaggccgagcgtgacgcagtcgctgacctgcttccttagcgcgtcaactcgcatccgccgccaatcccggtagtgttcaggaacatgcgcttcgggattgatttcggaaccacccgtaccgtcattgcggcggtcgaccggggaaactacccggtcgtcaacgtcacggacacggacggcgactcacgggagtacatcccctcggtcgtcgcgctggatggtgaacggttggtcggtggctgggaggcgctggcggtaggtggcccgaccctcacccgctccttcaagcgtctgctgacctcccgcaccgtcaccgcggagacccccgtccggctgggc

SEQ ID NO: 182 - protein, 325 aa, Corynebacterium humireducens
MTQNPVKIAVTGAAGNIAYSLLWRIAAGDVYGRDTPIELTLLEIPAAVRGAEGVAMELNDSAFPLLRNITVTDSADVAFDGANAAFLVGAKPRGAGEERADLLKNNGGIFGPQGRAINDRAADDVRVLVVGNPANTNALIAQRNAPDVPAERFTALMRLDHSRALSQLAEKLGVLTTDFENVVVWGNHSATQFPDVTFATVKGEPVIEKIDHDWYVNEFIPRVAKRGAEIIEVRGKSSAASAASAAVDHMRDWVQGTERWASAALPSDGSYGIDEGLVAGLPTVSRNGSWEIVQGLELNDFQREMIARNVAELKAERDAVADLLP

SEQ ID NO: 183 - DNA, 2100 bp, Corynebacterium humireducens
  CDS (301)..(1800): gene murE
gccggcaagacgggtacggcccagaaggtcgacccgcggacgggcgcgtactcgaactcggactactggatcaccttcgccggcatcgccccggcggatgacccgcgcttcgtcgtcgccgtcatggtcgacgagccccgcgccggcgtcgaggcgggaggcggcggtggccagtcctcggcgccgttgttccgtgacatcgcgtcctggctgctcaaccgggacaacatcccggcgtcaccgcccatggaggacatgctgatcctccacgcccactaacccagcccaccacggaggagtatgaccatggagaccacagtgaccacactgtcccacctcgcccgtatcgccgggggagagctgaccggatccgtggccccggtcgtcacgtcggtggagctcgactcctcccgcctcgcggacgagggcgcgctcttcgccgccgtccccggcacgcgccgccacggtgcggagttcgcgcgcggcacgccggccgtcgcgatcctcaccgacgccgccggaaaggagcttctcgacgccgccggcgacacccgccctgtcatcctcgtcgatgacgtccgcgcggtcctcggggccgtggccgcggagatccacggccacccctcggagcgtctcaccctgctcggcatcaccggcacctccgggaagacgaccaccagctacctgctcgagcaggggctcatggcggccgacctgaaggtcggcctcatcggcacgacgggcacgcgcatcaacggccgtcccgtccccaccgacctcacgaccccggaggccacgaccctgcagcccctgttcgtgcggatgctcgcggagggcgtcacgcacgtggtcatggaggtctcctcccacgccctggagctgggccgggtggcgggcacgcgtttcgacgtcgccgggttcaccaacctctcccaggaccacctcgacttccacccgacgatggaggagtacttcgcggccaaggcccgcttcttcgacccggcgtcgccgctggccgcggagcggtccgtcgtctgcgtcgacgacgagtgggggcggcggatggccgacctggcctcggacccggtgaccgtcgcgacccgcggcgcggaggccgacgtcaccgccgtccagagctcgctcacgcccaccggcgcccaggtcatccggctcaccctgccggagggggccgtcgaggcggagctgccgctgccgggtgacttcaacatcgccaacgccgccctggccaccgccatggcgtgggccgtgggcgtcgacccgcaggccttcaccgccggtttcctcgacgtcgcggtccccgggcgcatggagcgtatcgacgagggccaggacttcctcgccgtcgtcgactacgcccacaagccggccgccgtcgccgccgtcctcgacaccctccgcgggcaggtccgcggccgcctcggcgtggtcgtcggggccggtggtgaccgcgacgccaccaagcgtcccctcatgggggcggaggccgcccaccgcgccgacctggtcatcatcaccgacgacaacccgcgcagcgaggtgcccgccaccatccgggcggccgtgctgcagggggcggtcgacgccgggacggacgcggagatccgcgagatcggggaccgcgccgccgccatcgacgcgctgatcgagtgggcccgcccgggggacggcgtcgtcgtcgccggcaagggccacgaggtcggccagctggtcaacggcgtcaaccaccatttcgacgaccgggaagaggtccggcgcgcactcaaggagaagaagcattgatccccctcactctcgcggagatcgcggacatcaccggcggtgaactctcgcacgtgaccgacccggagacccgggtgaccgggtccgtcgagttcgactcccgccgggtcaccccgggcgggctgttcctcgccctgccgggggcgcgcgtcgacggacacgacttcgccgccaccgccgtcgagtccggcgcggtcgccgtcctggcggcgcggccggtgggggtgccggcggtcgtcgtgaagccgcggggccgcagtgactccaacgccgacatctacgcccacgacgaggacggct

SEQ ID NO: 184 - protein, 499 aa, Corynebacterium humireducens
MTMETTVTTLSHLARIAGGELTGSVAPVVTSVELDSSRLADEGALFAAVPGTRRHGAEFARGTPAVAILTDAAGKELLDAAGDTRPVILVDDVRAVLGAVAAEIHGHPSERLTLLGITGTSGKTTTSYLLEQGLMAADLKVGLIGTTGTRINGRPVPTDLTTPEATTLQPLFVRMLAEGVTHVVMEVSSHALELGRVAGTRFDVAGFTNLSQDHLDFHPTMEEYFAAKARFFDPASPLAAERSVVCVDDEWGRRMADLASDPVTVATRGAEADVTAVQSSLTPTGAQVIRLTLPEGAVEAELPLPGDFNIANAALATAMAWAVGVDPQAFTAGFLDVAVPGRMERIDEGQDFLAVVDYAHKPAAVAAVLDTLRGQVRGRLGVVVGAGGDRDATKRPLMGAEAAHRADLVIITDDNPRSEVPATIRAAVLQGAVDAGTDAEIREIGDRAAAIDALIEWARPGDGVVVAGKGHEVGQLVNGVNHHFDDREEVRRALKEKKH

SEQ ID NO: 185 - DNA, 2145 bp, Corynebacterium humireducens; identical to SEQ ID NO: 171
  CDS (301)..(1845): gene zwf

SEQ ID NO: 186 - protein, 514 aa, Corynebacterium humireducens; identical to SEQ ID NO: 172

SEQ ID NO: 187 - DNA, 1551 bp, Corynebacterium humireducens
  CDS (301)..(1251): gene opcA
cgcgatggaggtccgtgacgtcaacatggacttctcctacgcggaggccttcaccgaggcgtccccggaggcctatgagcggctcatcctcgatgcgcttctcgacgagtcctcgctcttccccaccaacgaggaggtcgagctctcctgggcgatcctggacccgatcctcgagttctgggctgagaagggccagcccgaggagtacgagtccggcacctgggggcccgcctccgccgaccgcatgctggaacggaccggccgcgcctggcgccgcccctgacctggaagggacccgacttgaagatcgaactgccggacaccgacacccggaacatcgccgccagcctgctcgaggcccgggagcacaactcccagaccaccgggcgggtgctcaccctcatcgtcgtcgccgcgctcgacgacgacgtcgaccacatcatctccgtcacccgcgacgcctcccacgagcaccccgcccgtgtgctggtgctgctcaccggccgggaggacgctgactcgcgtctcgacgccgaggtgcgcgtcggcggtcacgccggcgcctcggagatggtcatcatgcgcatcacgggcgagatggtcaaccacctcgccgcggtggtcacccccctgctgctgccggacaccccggtcgtcgcctggtggccgaccaccgcgccggagaacccctccgggcatccgctgggccagctggcgcagcgccgcatcaccaacgcggaccacccggacagtgagtcggtcctccggctccgccgtgccacctacgcccccggtgactccgacatggtgtggtcgaagatcaccgcctggcgcggtatcgtcgcctcctccctggaccgtcacccgcacgaggacgtggaggccgccgtcctcaccggcccggcggatgagccgcagatcgacatcgccgccggctggctcgccgaccgcctcggtgtgccggtccgccgggaggtgtgtgaaccgggtaacgacgcccggctcttccccatccgtcgtctcaagttcgaacgcgcctccggcccggtccgcgtcgaggtgctcgaccaccggaccgtgctcgtcgccctgccagggcgcccggagtcgctcgtcgccatgaacgagcgttccgacgccgactgcctctccgaggaactgcgtcacctcgaccccgatctcgcctacgccaacgctctgcgcggactcacccgtgtgaaaggaatcaatggtcaccctgcgtcgtcctgacaccctgtccaccctgctcgaccaggccgccacgtcgctcatcgacgtcgtcgctgccctccagaccaccgggggcggtgtccacgccgacggtgtggcccgcctggtgctcaccggcggcggcgccggcatcggcctgctggagcgcgtccgtgagctcgaggacgccgactcccgcatcgactggtcccgcgtccacgtcttcttcggcgacgagcgcaacgtgcccgtctcccacgaggactccaacgaggggcaggcgcgtaccgccctgctcagccacgtcgacatcccggaggc

SEQ ID NO: 188 - protein, 316 aa, Corynebacterium humireducens
LKIELPDTDTRNIAASLLEAREHNSQTTGRVLTLIVVAALDDDVDHIISVTRDASHEHPARVLVLLTGREDADSRLDAEVRVGGHAGASEMVIMRITGEMVNHLAAVVTPLLLPDTPVVAWWPTTAPENPSGHPLGQLAQRRITNADHPDSESVLRLRRATYAPGDSDMVWSKITAWRGIVASSLDRHPHEDVEAAVLTGPADEPQIDIAAGWLADRLGVPVRREVCEPGNDARLFPIRRLKFERASGPVRVEVLDHRTVLVALPGRPESLVAMNERSDADCLSEELRHLDPDLAYANALRGLTRVKGINGHPASS

SEQ ID NO: 189 - DNA, 2283 bp, Corynebacterium humireducens
  CDS (301)..(1983): gene hutU (Urocanate Hydratase)
gctacctgtccccggagatcgaggagtcggtgcagctgctcacctccggggcgctgctggaggcggtggagggggtcgtcggaaagctggcatgagcgggcgaatctcagatatgagactaaaggggcctccgggccctcgatcccgactgtgacctgtcttaccgtcagaagtgtcaccgacaccggccacaccagcccggtgctccacacccgacgatgacagccccgggccacccggatcgcgggtgccccggggccccggcctgatcggcccccaccgtagaaggagacccaccccatgaccgagtccccgcgcaccatccgtgccccgcacggcaccgagctcagcgccaagagctggcaaaccgaggcacccctgcgcatgctcatgaacaacctcgacccggaggtcgccgagcgccccgaggacctcgtcgtctacggcggcaccggccgcgcggcacgcagctgggaggcctacgacgcgatcatcgagacgctcagggacctcgaggaggacgagaccctgctcgtccagtccggcaagcccgtcggcgtcttccgcaccaacgtctgggcaccccgcgtgctcatcgccaactccaacctcgtcggcgactgggccaactggcccgagttccgccgcctcgaggccgagggcctcatgatgtacggccagatgaccgccggttcctggatctacatcgccacccagggcatcctccagggcacctacgagaccttcgccgccgtggcccgcaagcgtttcggcggcaccctcgccggcaccctcaccctcaccggcggctgcggcggcatgggcggggcccagccgctgtccgtcaccctcaacggcggtgtctgcctcatcgtcgacgtcgacgagtcccggctcaggcgtcggcaggccaagcgctacctcgatgaggtcgccaccgatctcgacgacgccgtcgcccgcgtcagcgccgccaaggaggagaagcgtgccctgtccgtcggcctagtgggcaatgccgccgaggtgttccccgagctgctgcgccgccaccgcgccggggagatcaccgtcgacgtggtcaccgaccagacctccgcccacgacccgctcagctacctgcccaccgagatcaccgtcgaggactggcagcgcgaggccgccgaggaccccatcaccttcaccaagaaggcacgcgagtccatggccgtgcaggtccaggccatggtcgagttccaggacgagggcgccgaggtcttcgactacggcaactccatccgcgatgaggcccgccacgccggctactcccgcgccttcgagttccccggcttcgtccccgcctacatccggcccctgttctgcgagggtctcggccccttccgctgggtggccctttccggcgacccggaggacatccgcgtcaccgacgaggccgtcaaggagctgttccccgacaacgagcacctccaccgctggatcgacgcggcaggggagtacgtcgagttcgagggcctgccggcccgcatctgctggctcggctacggcgagcggcacaaggcgggactgctgttcaaccgtctcgtcgccgagggcaaggtgaaggcgcccatcgtcatcggccgtgaccacctcgactccggttccgtcgcctccccctaccgggagaccgagtccatgctcgacggctccgacgccatcgccgactggccgctgctcaacgccctcaccgccacctcctccggcgcgacctgggtctccctgcaccacggaggcggcgtgggcatcggacggtccatccacgcgggccaggtgtgcgtcgccgacggcacggagctggccgccgcgaagctcaccgccgtgctcaccaacgacccgggcatgggcgtcatccgccacgtcgacgccggctacgaccgtgcccacgaggtcgccgtcgagcgcggggtccgtgtccccatgccgttcgtcagccgcgagaggtagccatgagcacgctgttccacggaatctccgagctgaggaccgtctccgggctgggcacgctcagcgacgccgcgctcatcgtcgaccggggccgcatcgcctggatcggcccgcgcgccggggcccccgccgccgacgcggcggttgatctgggcggccgggccgtgctacccggctgggtggactcccacacccacatgatcttcgcgggggaccgcgccgccgagttcgaggcccgcatgaacgggcaggactaccaggcgggcggcatcgcggtgaccatgtccgccacccgcgagg

SEQ ID NO: 190 - protein, 560 aa, Corynebacterium humireducens
MTESPRTIRAPHGTELSAKSWQTEAPLRMLMNNLDPEVAERPEDLVVYGGTGRAARSWEAYDAIIETLRDLEEDETLLVQSGKPVGVFRTNVWAPRVLIANSNLVGDWANWPEFRRLEAEGLMMYGQMTAGSWIYIATQGILQGTYETFAAVARKRFGGTLAGTLTLTGGCGGMGGAQPLSVTLNGGVCLIVDVDESRLRRRQAKRYLDEVATDLDDAVARVSAAKEEKRALSVGLVGNAAEVFPELLRRHRAGEITVDVVTDQTSAHDPLSYLPTEITVEDWQREAAEDPITFTKKARESMAVQVQAMVEFQDEGAEVFDYGNSIRDEARHAGYSRAFEFPGFVPAYIRPLFCEGLGPFRWVALSGDPEDIRVTDEAVKELFPDNEHLHRWIDAAGEYVEFEGLPARICWLGYGERHKAGLLFNRLVAEGKVKAPIVIGRDHLDSGSVASPYRETESMLDGSDAIADWPLLNALTATSSGATWVSLHHGGGVGIGRSIHAGQVCVADGTELAAAKLTAVLTNDPGMGVIRHVDAGYDRAHEVAVERGVRVPMPFVSRER

SEQ ID NO: 191 - DNA, 1809 bp, Corynebacterium humireducens
  CDS (301)..(1509): gene hutI (Imidazolone Propionase)
ctccgacgccatcgccgactggccgctgctcaacgccctcaccgccacctcctccggcgcgacctgggtctccctgcaccacggaggcggcgtgggcatcggacggtccatccacgcgggccaggtgtgcgtcgccgacggcacggagctggccgccgcgaagctcaccgccgtgctcaccaacgacccgggcatgggcgtcatccgccacgtcgacgccggctacgaccgtgcccacgaggtcgccgtcgagcgcggggtccgtgtccccatgccgttcgtcagccgcgagaggtagccatgagcacgctgttccacggaatctccgagctgaggaccgtctccgggctgggcacgctcagcgacgccgcgctcatcgtcgaccggggccgcatcgcctggatcggcccgcgcgccggggcccccgccgccgacgcggcggttgatctgggcggccgggccgtgctacccggctgggtggactcccacacccacatgatcttcgcgggggaccgcgccgccgagttcgaggcccgcatgaacgggcaggactaccaggcgggcggcatcgcggtgaccatgtccgccacccgcgaggccggcgccgtccgcctcgagcagctgctgctgcgccgcctggccgatgcgcgcgccgggggcacgaccacggtggagacgaagaccggctacgggctcgacgtggactccgaggccctggcggccgacatcgccgcccggcacgtcgatgacgtcaccttcctcggcgcgcatctcgtgccgccgggggaggacccggacgagtacctcgctctcgtgctcggcgacatgctcgacgccgtcgcggccaacgtcagctggatcgacgtgttctgcgaacgcggggccttcgatgaggcggccgcccgccgcgtcctcgaggccgggcgggcgcggggtctggggctgcgcgtgcacggcaaccagctcgggcacggtcccggagtgcagctggcggtggagtacggcgccgccagcgtggaccacgtcaactacgtgagtgacggtgacgtggaggcactcgcctcctcggagacggtggccacggtcctccccgcctgcgacctgtccacgaggcagccgctggcgccggcccggaggcttctcgacgccggggtccacctcgccctcgcctccaacctcaacccgggcacgtcgtacacctcgtcgatggccttctgcgtcaccaccgcggtgctgcagcagcacctcaccctcgacgaggccatccacgcggccaccgccggtggggcgcgggcgctgcggcgtcacgacatcggcggcggcgtcgacccccagggccgacccgcccgcggcagcctcgtggtcggggccgcggcagacctgcacgtgctggacaccccccacgccatcgatctggcctaccggccggggatgccgctcacgtggcggacctacatccagggggtgcaggtccacccggaaccgcaggatcagtccgacggccgatgacgcacgatctcctccacgatccgggccgcgacccgcgcggtccggccgtcgacgtcgagaagcgggttgagttcgacgacatcgaccagacgcagcttcccgctgcgcgccacggctctgacgagcgtcaggatccgtgccagatcgacgcccaacgccgccggcgcgctcacgccgggggcgaccgccgcgggcaggacgtcaaggtcgatgctcaggtggacgtccggggcgtcctccaggagctttccgacgagcgcctcgcacccggccgacgtcatctccgccagctcgacgtcg

SEQ ID NO: 192 - protein, 402 aa, Corynebacterium humireducens
MSTLFHGISELRTVSGLGTLSDAALIVDRGRIAWIGPRAGAPAADAAVDLGGRAVLPGWVDSHTHMIFAGDRAAEFEARMNGQDYQAGGIAVTMSATREAGAVRLEQLLLRRLADARAGGTTTVETKTGYGLDVDSEALAADIAARHVDDVTFLGAHLVPPGEDPDEYLALVLGDMLDAVAANVSWIDVFCERGAFDEAAARRVLEAGRARGLGLRVHGNQLGHGPGVQLAVEYGAASVDHVNYVSDGDVEALASSETVATVLPACDLSTRQPLAPARRLLDAGVHLALASNLNPGTSYTSSMAFCVTTAVLQQHLTLDEAIHAATAGGARALRRHDIGGGVDPQGRPARGSLVVGAAADLHVLDTPHAIDLAYRPGMPLTWRTYIQGVQVHPEPQDQSDGR

SEQ ID NO: 193 - DNA, 2151 bp, Corynebacterium humireducens
  CDS (301)..(1851): gene hutH (Histidine Ammonia lyase)
ccccggcgtcgtcggtaccggcccggaatgccatccgtgcagctcagagccctgacgggcatctcgtatgcgagatagattccgcgcacaccggaaagtctcgtaagtgagacagccgtgcccttcacgggctgtcgccggggcgtgacggctgacacactgggaggaactgcgtccggctgtcgcgcaggtcgaaccgtccacgagtcaccgccccggaggacaggtaccacctgtgcctgccccggggccggtgccccggagaaaccgggacccaccaggaagcaggggaagccccacatgcagaccatcacctcccacatccgcgtcggcgtcggagcgctcagcatcgacgaggtcgtggctgtcgcccggcacgacgcccacgtcgagatcaccccggaggcgctcgaggccgtcgccgccacccgtgcccgcatcgaggaactggccgaccacccgaccccggtgtacggcgtgtccaccggtttcggcgccctggcccgccgctacatcccccaggagatgcgcctccagctgcagcgcagcctcgtccgctcccatgccgccggctccggccccgaggtggagcgcgaggtcgtccgggcgctcatgctgctgcgcctgtccacactgtgcaccggccgtaccggcgtgcggccggtcgtcgcggagacctacgccgcggtgctcaacgccggcatcacccccgtcgtccacgagtacggctcgctcggctgctccggcgacctctccccgctggcgcactgcgccctggcgctgctgggggagggcgaggtcaccaccgctgacggccgccgcctgcccgccgccgtcgccctcgccgagcacggcatcgagccgctggtcctgcgggagaaggaggggctggcactcatcaacggcaccgacggcatgctgggcatgctgtgcctggccatcgctgacctcgagtgcctggcccgcagcgccgacatcgccgccgcgatgaccgtcgaggccctgcggggcaccctcaccgtcttcgccgcggacctgcaggagctgcgcccgcacccgggtcaggcggcctccgcggccaacatccgcgccgtggccgagggctccgccatactgcagtccgccaccgaggaattcgccctgacccacgtgcaggacgcctactcggtgcggtgcgccccgcaggtcgccggtggtttccgcgacaccctggcccacgcccgcctggtcgccgaccgggagctcgcctccgccgtggacaaccccgtggtggctctcgacggccgcgtgacctccaacggcaacttccacggcgcgcccgtcggctacgcgctcgacttcctcgccatcgtcaccgccgacctggcgagcatctccgagcgccgcaccgaccggcttctcgacgtcgcccgcagccgcggactcaacgccttcctcgccgacgatccgggcgtggactccggccacatgatcgcccagtacacgcaggccgggatcgtctccgagctcaagcggctggccgccccggccagcgtggactccatcccctcctccgccatgcaggaggaccacgtgtccatgggctggtcggccgggcgcaagctgcgccgttccgtcgacgggctggggcgggtgctcggcgtcgaggtgctcaccgcagcccgggccatcgacatgcgcgagcaggagcccgcgccggggacccgcgccgcactggacgccctgcgcggccgtgtggaggggcccggccccgaccgctacctgtccccggagatcgaggagtcggtgcagctgctcacctccggggcgctgctggaggcggtggagggggtcgtcggaaagctggcatgagcgggcgaatctcagatatgagactaaaggggcctccgggccctcgatcccgactgtgacctgtcttaccgtcagaagtgtcaccgacaccggccacaccagcccggtgctccacacccgacgatgacagccccgggccacccggatcgcgggtgccccggggccccggcctgatcggcccccaccgtagaaggagacccaccccatgaccgagtccccgcgcaccatccgtgccccgcacggcaccgagctcagcgccaagagctggcaaaccgaggcacccctgcgcatgctcatgaa

SEQ ID NO: 194 - protein, 516 aa, Corynebacterium humireducens
MQTITSHIRVGVGALSIDEVVAVARHDAHVEITPEALEAVAATRARIEELADHPTPVYGVSTGFGALARRYIPQEMRLQLQRSLVRSHAAGSGPEVEREVVRALMLLRLSTLCTGRTGVRPVVAETYAAVLNAGITPVVHEYGSLGCSGDLSPLAHCALALLGEGEVTTADGRRLPAAVALAEHGIEPLVLREKEGLALINGTDGMLGMLCLAIADLECLARSADIAAAMTVEALRGTLTVFAADLQELRPHPGQAASAANIRAVAEGSAILQSATEEFALTHVQDAYSVRCAPQVAGGFRDTLAHARLVADRELASAVDNPVVALDGRVTSNGNFHGAPVGYALDFLAIVTADLASISERRTDRLLDVARSRGLNAFLADDPGVDSGHMIAQYTQAGIVSELKRLAAPASVDSIPSSAMQEDHVSMGWSAGRKLRRSVDGLGRVLGVEVLTAARAIDMREQEPAPGTRAALDALRGRVEGPGPDRYLSPEIEESVQLLTSGALLEAVEGVVGKLA

SEQ ID NO: 195 - DNA, 1509 bp, Corynebacterium humireducens
  CDS (301)..(1209): gene hutG (Formididoyl glutamase)
cgagtccgtaggtgcgggtctcggggatgcgcacgacgtagccctccgactccatgacggcgagcaggtggtacgtcgacgaccgggggaggtcgagttccgtcatgatgcgtgccgccgagacgggcacgtcgatggatgagagcagcgagaggatgcgcaacgtgtgtcgcgcggcgggcacctgtcccatgtcactccttacctgtgtgtggtctgtgggtcggcggtctcgtatgcgggaccacgctgcgtcgcagccgggtgtggcgggaggtcggtggcgttatcctacggcgcatgaccacccatgaatggacaggacgcgacgacgggcccggggccgggcacgcccgttggcacagcgtcatcaccaccacgaccgaccggccgggggtcgccctcgtcgggttcgcctccgacgagggggtccgccgcaacggtggccgccccggcgccgccgccggccccacggagatccgccgtgccctggcctccctggccgtgcacaccgacgtcccgcttctcgacgccggcaccgtcaccgtctccggtaccgacctggagggcgggcacgacgcactgtccgcgcaggtggaggagctgacccgcgcggggcacaccgtcatcgtgctgggcggtgggcatgagacggcgttcgggtcgcaccgcggggtgcgccgggcgctggggcacagtccggcgatcatcaacctcgacgcccacttcgacctgcgggtcgcgccggccccgtcctcgggtaccccgttccggcagatcgcggacctggccggggaggagttccgttatgcggtgctgggcatctcggtgcccaacaacacccgggcgctgttcgacaccgcccgggaactgggggtccgggtgaccaccgacgtcgagctggcggagatgacgtcggccgggtgcgaggcgctcgtcggaaagctcctggaggacgccccggacgtccacctgagcatcgaccttgacgtcctgcccgcggcggtcgcccccggcgtgagcgcgccggcggcgttgggcgtcgatctggcacggatcctgacgctcgtcagagccgtggcgcgcagcgggaagctgcgtctggtcgatgtcgtcgaactcaacccgcttctcgacgtcgacggccggaccgcgcgggtcgcggcccggatcgtggaggagatcgtgcgtcatcggccgtcggactgatcctgcggttccgggtggacctgcaccccctggatgtaggtccgccacgtgagcggcatccccggccggtaggccagatcgatggcgtggggggtgtccagcacgtgcaggtctgccgcggccccgaccacgaggctgccgcgggcgggtcggccctgggggtcgacgccgccgccgatgtcgtgacgccgcagcgcccgcgccccaccggcggtggccgcgtggatggcctcgtcgagggtgaggtgctgctgcagcaccgcggtggtgacgcagaaggccatcgacgaggtgtacgac

SEQ ID NO: 196 - protein, 302 aa, Corynebacterium humireducens
MTTHEWTGRDDGPGAGHARWHSVITTTTDRPGVALVGFASDEGVRRNGGRPGAAAGPTEIRRALASLAVHTDVPLLDAGTVTVSGTDLEGGHDALSAQVEELTRAGHTVIVLGGGHETAFGSHRGVRRALGHSPAIINLDAHFDLRVAPAPSSGTPFRQIADLAGEEFRYAVLGISVPNNTRALFDTARELGVRVTTDVELAEMTSAGCEALVGKLLEDAPDVHLSIDLDVLPAAVAPGVSAPAALGVDLARILTLVRAVARSGKLRLVDVVELNPLLDVDGRTARVAARIVEEIVRHRPSD

SEQ ID NO: 197 - DNA, 1767 bp, Corynebacterium humireducens
  CDS (301)..(1467): gene sucC
gctggccggtccggacttccggtacctcgatcacatcaagccgatctacgaccagcccatcggtgaggcgacctggcgcgacatgtccacctggttcacgtggcagagcaggggagaccgtttcggctacggccacctgacgtcggaactctgcagcggtcggctcggggagctggtggaacgcttcctggagctgtgggacgcgcccaccacggcgtagcgcctccgtccggggcgtgtggccgcagggtatcgccgatccggcgtcgtgcgtgcggcaacgtctatacactgcagggcatggacctctacgagtaccaggcccttgaactcttcgccgcccacggcgttccggttctgtccggaacggtggctgagactccggcggaggcacgcgcggcggcggagcggctgggcggggagtgcgtcgtcaaggcgcaggtgaagatcggcggccgcggcaaggcgggcggtgtccgcgtcgcggcggcgcccgaggcggccgagcaggcggcggaggcgatcctggggatggacatccgcgggcacacggtcgagcgggtgctcgtcgtggagtgcgtggagatcgaggcggagtactacttctcgctgctcctcgaccgcgcgcggcgctcctacctggggttgttctcggtggagggaggcgtggacatcgagaagctcgccgcggagcggccggaggcgctggcccgcgtggaggtcgaccccctcgagggcttcgacgcccacgaacttgtcgacgccctccccgccgacctccgcgacaaggtcgtccccgtcatccggcggctcgccgaggtcttccgcgaggaggacgccaccctcgtcgaggtgaacccgctcgtcctcacggtgcagggggacatcatcgccctcgacgcgaagatcaccctcgacgacaacgccgccttccgtcacgacaaccgcgcggagctcgccgaggccgccgaccacctcgacccgatcgagcgacgcgcgagcgagcaggggctcaagtacgtcacgctcgagggttcggtgggcatcatcggcaacggcgccgggctggtcatgtcgaccctcgacgtcgtgtccggggcgggggagcggcacggcgggcagaagccggcgaacttcctcgacatcggcggtggcgcctgcccggagacgatgaccgcggccctggagatcgtcctctcggacgagcaggtgcgcagcgtgttcgtcaacgtcttcggaggcatcacgtcctgcgacgcggtggccaccggcatcgtggaggcgctcactcacctcggggacacggcccgcaagccgatcgtcgtgcgtctcgacggcaacagcgtcgacgagggacgccgcatcctccgcgagtacgatcaccccctcgtcaccgtcgtcgacgacatggacgaggccgcggaccgggtggcggagctcgccgcggtgaccccgagcgtcgtctagcgaaaggcaccgacatggcgatcttcctcaactccgaatcccgcatcatcgtccagggcatcaccgggcgtgaggggcgggagcacaccgcccggatgctcgccgccggcgcgaacgtggtcggcggcaccaacccgaagaaggcgggcgagacggtgacggtcggcggccacgagctgccggtgttcggcaccgtcgccgacgcacgcgcggccaccgacgcgaacgtgtccgtggtgttcgtgcctgcccccttcgtccgggaggcggtctgcgaggccatcgacgccgcgatcccgc

SEQ ID NO: 198 - protein, 388 aa, Corynebacterium humireducens
MDLYEYQALELFAAHGVPVLSGTVAETPAEARAAAERLGGECVVKAQVKIGGRGKAGGVRVAAAPEAAEQAAEAILGMDIRGHTVERVLVVECVEIEAEYYFSLLLDRARRSYLGLFSVEGGVDIEKLAAERPEALARVEVDPLEGFDAHELVDALPADLRDKVVPVIRRLAEVFREEDATLVEVNPLVLTVQGDIIALDAKITLDDNAAFRHDNRAELAEAADHLDPIERRASEQGLKYVTLEGSVGIIGNGAGLVMSTLDVVSGAGERHGGQKPANFLDIGGGACPETMTAALEIVLSDEQVRSVFVNVFGGITSCDAVATGIVEALTHLGDTARKPIVVRLDGNSVDEGRRILREYDHPLVTVVDDMDEAADRVAELAAVTPSVV

SEQ ID NO: 199 - DNA, 1455 bp, Corynebacterium humireducens
  CDS (301)..(1155): gene sucD
cctggagatcgtcctctcggacgagcaggtgcgcagcgtgttcgtcaacgtcttcggaggcatcacgtcctgcgacgcggtggccaccggcatcgtggaggcgctcactcacctcggggacacggcccgcaagccgatcgtcgtgcgtctcgacggcaacagcgtcgacgagggacgccgcatcctccgcgagtacgatcaccccctcgtcaccgtcgtcgacgacatggacgaggccgcggaccgggtggcggagctcgccgcggtgaccccgagcgtcgtctagcgaaaggcaccgacatggcgatcttcctcaactccgaatcccgcatcatcgtccagggcatcaccgggcgtgaggggcgggagcacaccgcccggatgctcgccgccggcgcgaacgtggtcggcggcaccaacccgaagaaggcgggcgagacggtgacggtcggcggccacgagctgccggtgttcggcaccgtcgccgacgcacgcgcggccaccgacgcgaacgtgtccgtggtgttcgtgcctgcccccttcgtccgggaggcggtctgcgaggccatcgacgccgcgatcccgctcatcgtcgtcatcaccgagggcgtgcccgtccgcgacaccgccgagatgctggcgcacgcgcggacggagggaggcacgcggatcatcggcccgaactgccccggcatcatccccgcggatatcagcggccccggccccgtgggactgatctcgaagtcgggcacgctgacgtaccagatgatgcacgcgctttccgacgtcggcatctccaccgccctcggcatcggcggcgaccccctcatcggcaccgcctacatcgacgcgctcagcgccttcgaggaggaccccgacacccgggccatcgtcatgatcggcgagatcggcggcgacgccgaggaacgcgccgccgactacatccgggagcacgtgaccaaacccgtcgtcggctacgtcgccgggttcaccgccccggagggcaagaccatggggcacgcaggtgccatcgtcaccggttccgtcggcacggcgcaggccaagaaggaggcgctcgaggcggccggtgtccgggtgggcaccacgccgacggagaccgcggagatcatgcgggggattgtcgaggggatgtaggctgcccgggtcgcgtcggcggcctatcatcggagcatgctggagaccggacgcacccaccccctggcagacatcattgacacggtccttgccgacccgacctcgggctccggctggtgcctgtacacaggcccggggatgaccccgggggagtacctcgtcgacgagtaccccgaggtcggcgatgacgataccgagacctatccgccggcggtgagggaacgaggtctggactatttcctcagtggtcagatgtgcgaggacgtgatcctcaatctggaccaccagggatccccactt

SEQ ID NO: 200 - protein, 284 aa, Corynebacterium humireducens
MAIFLNSESRIIVQGITGREGREHTARMLAAGANVVGGTNPKKAGETVTVGGHELPVFGTVADARAATDANVSVVFVPAPFVREAVCEAIDAAIPLIVVITEGVPVRDTAEMLAHARTEGGTRIIGPNCPGIIPADISGPGPVGLISKSGTLTYQMMHALSDVGISTALGIGGDPLIGTAYIDALSAFEEDPDTRAIVMIGEIGGDAEERAADYIREHVTKPVVGYVAGFTAPEGKTMGHAGAIVTGSVGTAQAKKEALEAAGVRVGTTPTETAEIMRGIVEGM

SEQ ID NO: 201 - DNA, 1569 bp, Corynebacterium humireducens
  CDS (301)..(1269): gene ddh
ggcgccaccctagcgcctgagccggtttctgacacccgcggatcctgcggtaccatctgcaggcaggcgggtacatgtgcctgccggtgctggagtggcgcaatcggtagcgcaacggtcttgtaaaccgtaggttgcgagttcaagtctcgtctccagctctgctctccacgaggtggggtccgggtgaaccggccccgcctcgttcccttttgtgggactcatttctattgactgaccggtgatgggccgtagaatgggcggcagcaagcaccgtcccccacctcaaggagtcagcacatggccaacatcagggtcgcgatcgtcggttacggcaacctcggcaagtccgtcgagaagctcatcggccagcagccggacatggagctcgcgggcgtgttctcgcgtcgcgacgcactggacaccctcgacccggccaccccggtcctgcccgtcgcggagttcggtgagcacaccgacaagttcgacgtcgccgtcctctgcctcggctccgccaccgacatcccggagcaggcccccgagttcatccgccacgccaacacggtcgacacctacgacaaccaccgcgacatcccgcgccaccgcgccgagatggacagggtggccagggagaacggcaccgtcgccatcgtctccaccggctgggacccgggcatgttctccctcaaccgcaccatcggccaggcgctcctgccgggcggccagcagcagaccttctggggtccgggcctctcgcagggccactctgacgcggtgcgccgcgtcgcgggcgtgaagaagggcgtgcagtacaccatcccctccccggaggccctcgaggcggcccgcaagggtgagtcgggtctcagcggcaagcaggcccacctgcgccgctgcttcatcgtggcggacgaggccgaccacgagcgcatcgagaacgagatccgcaccatgcccgactacttcgtcggctacgaggtggaggtcaacttcatcgacgaggccaccttcgacgccgagcacaccggcatgccgcacggcgggcacgtcatcacggcgggtgacaccggcggctacgtccagtccatcgagtacaacctcgacctggaccggaacccggacttcaccggtgccgtcgccctggcatacgcccgtgcggcccaccgtctgcgtgaggcgggccaggccggcgcctacaccgtcctcgaggtcgccccgtacctgatctccccgacgccgctcgaggagctcatcgcccgcgacgtgtagggtccaccaccgggatcagcaggagggcaccgaccagcaggaccaggccgatgccgaggatcccgaagcggtcggtgccgcccagcaggacgaacatcccgaaggcgagcggcgagagccacgacacggcgcgtccggtggtgacgtacaggccgaagagctggccctcccgcccgtcgggggcgacgcgggagaggaacgagcgggccgccgactgggcggggccgacgaacaggcacaggatgaggccgaagatccagaacatctgcgggccctccacgaagtagaggacgcccgcgg

SEQ ID NO: 202 - protein, 322 aa, Corynebacterium humireducens
MANIRVAIVGYGNLGKSVEKLIGQQPDMELAGVFSRRDALDTLDPATPVLPVAEFGEHTDKFDVAVLCLGSATDIPEQAPEFIRHANTVDTYDNHRDIPRHRAEMDRVARENGTVAIVSTGWDPGMFSLNRTIGQALLPGGQQQTFWGPGLSQGHSDAVRRVAGVKKGVQYTIPSPEALEAARKGESGLSGKQAHLRRCFIVADEADHERIENEIRTMPDYFVGYEVEVNFIDEATFDAEHTGMPHGGHVITAGDTGGYVQSIEYNLDLDRNPDFTGAVALAYARAAHRLREAGQAGAYTVLEVAPYLISPTPLEELIARDV
